United States Patent Application Publication US 2012/0108651 A1 - sequence listing, part 4

SEQ ID NO: 417 - DNA, 601662 bp, Homo sapiens
acttggatgattcttcagctggctataaaattctaaaatcagagtaaccgtgtattgacttccaacattccacatttccaaaggtacatgtaatctcaatcagatttatgttttttgtgtgtgttctctaataacttttgggatcttttctctattctctaccattaatttcggaagtttcactctgcgtaggtgtgaacctaaaatatttttcctgcatcttgttttatatttccattcctaaacactttaagaattttaaagatacttatcttgggatacttttcaggttgacttcatctatttcctttggtgtaaactcttccattcgctgttattcataatgtttatcttctgaaacatttttaggatttttgttttgtgagctcacattctgtacattcctcctgttgttctctttcatggaaagccgcagcctgtttcccaggtccacgccaggctgcatttgctcagaaatgctcctgcatagtgttcatatatttatcctcagaaatgctcctgcatagtgatatatttatgctcagaatatgccctgcatagtgatatatttcctccccgtgtctgctaatggcatgacctcactcaccttcatgtacaggggatcataccagaaaccatggccactgcaaaccatggtcactgtagttccttagtggccttgggaatggtgcaagggtgtccagttagtctctgtttatgggagttctgtgtttcccaccctgagctccaggaagatagtgtttattgggactgcattcaaagagatctaagagatcctgcctccggcttctgaactttctgcttgagatccatgccctgttctcccaggagaagtgattttagtctttgacaattaccaaataccccctttggttatgttcttgttagaaaatagtcacttttcttcttttcctaaggaactatgtgtttgctagtcttgaaattttagaaatcattcccatttggagagagtggagggtttagaatatgtttcatctggctttataattatatatttttgttttattattattattattattttatagagatgaggtctctctatgttgcccaggctggtctcgaaactcctgagttcaagtgatcttcccactttggcctccctaagtgttaggattacaggtgtgagccaccacacctggcctgcctttataaatattattgtaaaatgtctttagcctagatgaagctgaaattctttccagtgaatcttctgctgtggctattaaagtttactatgaaaaagaagcagaaagacatgctcctgtgcctgaacactgaagaggattgcaaaggccaaaggcaggaagaagttcaggggataggatggagaatgagcatagcaagttgctcctgaacttagtcctgtaataagtctgcagggcagaaggttccagggcacataaactaggataggaactgctatcctagtttatatggagtggagtgatatagtttgtgtggaatgatatggtaactaggtatatgaatacattcctcatagcaacatcattccacacaggcaattcagactctggcctgaaggcaacaattctgagtttattctttatttcctgaattcagtctccctcaacctgtgaattgcaacctcacctaccaaatgtctgctaccacttgagtgggaccatcaccagcctggatttgagagctcacctggcaatttctccagccattatatcatggaatcaataggttacagggtctccaagacctcctatgccaaatcattcagtctttctgtggggttatgagtaccccttccctgtgtagtccaggagactgctggaaacttggtgtgtgtgtgggtgcagagggtggcgagagaagttcctatacttgtaggacaaaaatacttttggagccagacaaaaatagctttggacaccctggactgggaaagatgggatgattccatccctgctacattatcactctctgtcatctactctcttcttcacctccagctcataatggctaggttcccataggattttccattctacacatgtcttagtctgttttgtgttgctgtaactgaatgcacgagactgggttatttacaaagaaaagacatttatttctcacagttttggaggttaggaagtccaaggttgaggggttgcatctgatgggggccttcttgccggtggggactctctgcagggtcctaaggcagctcagggtgtcacatggcaagaggacaagaaaatgccaaactggcttttataacagacacactcctgtgataacccattagtctactaatccgtgaatgggttattcctttcaagacagaagagcaaatataacccagccacctctgaaataccccatcttcaacatgagtcttggaggacgcagacattcacaccatagcatgaggctgtagatgtcttcaaaacaacctctgcctttgtcttctagaagtggagtttccagactctacttgttcaaggatgctgtgtccttgacttagctcattatcaccttttggtcacctttttcatcctggtgctttatggactctaattgatcggtttccaacccaccaccatatctgactgtgctctaggtgtttcctgtgatctctgggatcctgatccgcaccactcaactttggcctcctaaacttcatccttgaccccaccccaggtaggaaggatgtgtggatatttcttttatctttctgcaacgatgaccttttggagaaaaagaaaggaagcaggtaagataaacattgctttatccattatgtatcaagcactgtgcttgatgatttacattatcttcatcctttcaaccaatactggaggaagatgatattcatctttaaaatatatcaaacatgctcagctttatttcccaataaatgtgaaatgattaaggtcctataatctgattaagatatcaagattaatcaaattttttaaacaaaattcgcattttatttagattgatataaattatagtttattttcttcaccaaaaaataactgcaatattttccgtatttttctagataagccaatacacttatatttgtaggttttccgggtttttcttataaatcaagatgaggcaataggtaagagtcatgaaaaaagacagaaaaaaaagataaatcagttgtcagtatccatagcctctgattctgtcttagccgtgaaacagaagtggtcaacatatacttactaaaaaagcttaggaaaatgtaggctccacaaaggaatataaacagcaacaactagatgtggaacgacagcaggctcttccattcaaactttaactgtcatttgttcctttaagttcatttgtgaaagataaaaatctaccctgaaatccttgtttggcaagctcacaagcgtctctttctctggtaatttcttgtaactgtccaatatagatttttaacatacttaaaactcctattagtgaaaggtcaattgtgggcttcactgtaacattttataaaatgtattccttcctctcatacctcttcaaaatatgtttcttcaaagaattggtaactcaacacccaaggagcagagatccacagtgataataaatgcggtgtctcaaatgacttaaacaattgcagagtgccacccacagagatcatgcggaagtgaaagatgacactttcaatgttctgttctggaagaacagacaggtcttcaaagcatgcgggttcaaacgggccatttaaacaggtagattatcaatggctaatgtattcaatggaggcctacaggcaaagatattaagtgattaaggcctacatacaccttatggctttccttccaaatatcgaatataagaaagactatttttaaaagtctcaggtattttccatggtttctgaattatctgtgggaagctctgacttactgttacagagtttaatatatgtgtccaccaataaatccaggtcatgttttatatcaaaatttatgttaatctaagccaagttacttgacctttggtctgtcaaagtgttcctcaagtatgctttaagatgctttcgtccattttcatactgctcattctcaaccttcatcacaggagaaatacacaggacctttggcaataggtcatttagcatacacattaggaaaaaacttgatgtcaggcagatggagggcttcataaatggtggacagaagctctgtgtctttccccatttccatttgattctccaacaatgaagctcggctgagagcatgtcgggattgggtaagtcatttctatacatgtcagcatggtgttcctccgatgtattgaatttgagttgtcccatgactgagggtaccagagataagcatttacgagcttggaggtgctgttctgcgattatatctttaagttcctgaataatgtgctccactgttgggacacttaggatttctttatagtaactctcagaggttagctgagattccaagttacgctggtaagctctgcaatatttcccagggagtttcatttgaatatcaagtttggttgccaaatttgtggcttcctcaaatcaaaattcctgataaacttcaatattctccgtcacttcactgagtgaacgcagtgctgcagtcaagctactggctgcaaagaagacatcaaaggtttgcccctggagatttttcccaaaggctctggtaaaagataggacatttttaagaacaacaatagtaacaatgaagtcaaaatctgttactgcactgcagagtacaaatgctcagccagctacagttattccatctaatatttgtgtcactatttatatcatctaaacataaaacaaatgcttgcagaagttccactacaatttcaaaaacatcatgcctgcctgtccactgagaatggcagagttccttcagttctttgtccctttctttactgttctgaaaaagaacagaaattacattgtcaaattctaaaagcagttgtggtgattgatggaaaaaaagaacaaactccgtcaattgttcctgatgcaacagatactcccataacaggtactgattttaccaaccacatatttaagacgcaggaagagcagagtgggtagatagcttggggatatttctctaaaagtctagaagcaacaactttcattttggaagaaaatccagtagacaaaatgtaagcttggtcatgacagtactccatatttaatccccatttctcagctatcatagtgtgaaatttcacagccaaaacttctgcatcagcttcataaggcaggaagcctacaaattcccctcttatgttttgagactcatcaacaaacctcaccgagactcatcaacaaatctcaccaacataggtaggtgcccttcccctgccatgtccgctacatcgtcagttataatggaaaagaagtgtgagtctctcacttccctgcattcttcccgaatgcagctctcacagatctctagcatctgcctctgctgtgtttttaataaaacaacatgttaactgctgttgtctcaaactgctttctcaggacctcttgaccagaatttatccagcactccagcacggcttgcacgttatctggagtaaagagaccttctgggatttcatcagcctcctgtccatcaagaggtatgttttgctttcccatcagaatcaagatttcaaacagagattttaggtatcctttgttttccttcttttcaagggttagaggtaaaatgtcctcatctggcccttcactcccttctttactggggttcggagcattgctgttgttggtttctttatgtttttgttcctgttcagaagtttcatcaacaattcttttattcgttttctgggtctactaggtgggttgttcaaatgaccagtaagagcaaatattgttggtattgcattatctcatagaactgtcctataaggactagttctacagaccccagatgtctcaaaatgtttggcacctcattgatcatgtttagctgatcatccctggggctggggagggcagccaggccagccagcgcgcagggcaggggcgggcggaggagaagcctggaggaggctgacgggaagcctcgaggaggggcaccccggtccgaggctgggctgggaacgctgctccacagcgctgtgagtggccgggaggacttaccgccaccaccgctgcctctggggcatctcccacccgcccgggatgctgccgcctcctttccacaatgcctgttgatcaattttttaatcaagaagtattcatgtctacccagcctctaatgacttttttgaaaatgaagttacaaacacaaagcacatatcagctccaaaaactcctcaaaatatctaagggcgtctgcaagtttttcttctaatctgatttttaaatggaagcatcttatgtttgatacaaaatttgatgtcttttaaaaaatgagttctagagcacaacattttcaataaaaagtacaaatgtatggttgtacaataaaatgtataagataccttttttgtgtgtgtgtaatacatgaatgtagttcctctctattctttatgctctttaaattcttcattattatgcactatttcttaaaatggcctagggaatggattggtagctttggctgtttcctgctgacgttttagagggctactaaaatgtgcaaagaggtagttacagacaacagtaaaacaactaaatattcaatgtgccctttcaaatgtgtatttaaggacacagaatcttctgtgtggagacaatctgtgcatgcagctagactaaatgcgtgctagcagccaagacttgcctctctcagtagaccagaattattcataaaccatcatgtaaagagaagtgagcagtcaaccaggagaaccaagggcacagctgtgagtcctgagtagcaagatcaaatctcacacactcattacgaagagggagggtttgtgccttcatttatttttggacacagcttagctaaggttgctggccatatttctgttattttgattcaagcagaaaatcctgtgcagatccacggaacacattattgtaacatcgctcagaggagaattgggccaatgcaatttagaggatgaaaatagctctgcaacgtggtgtagaaactctggtttattggaggataacttttttgatggtctcaaagttaaaaaaaaacttaaaaacaattttattaaatagaaacttgagagatttttattctatgccttatagatcaaatgattttagcatggggtgcgaggcagatgccaagggcttactggagtgaactgcaagcaactccaaaacttttctgtgcttctcctgaaatactcttgctttgtatgtgagtcgtgtctaggccacattaaatggagtcattaggcttgagtaacttgagtaactttttaaattaggaattcttgacttggggtttctcttttctgccgtctttttctacgattgaaaatggcaataaggacgaatttttccatgatttggaattaccaggaaggatggacttctaaggactgatagcttgtgaaagataaccactgaaataaccaatcgtatttgtgcaaggctcattgttttaacgccatattcgtcttataggattattgttttccttaaaagaatgtttctactaactagacttttaatctaacttcagtgctgtctgtccaagactgtcctgaattaagtgattttaagggataaagtctatcaatttaatttatttgcattttatggattcttcttttttattaaaaaaatgtttacagtttagattatagcttatatacaaatttctcctatgaagtctcttccgttttgtgacagtttgattaaataaccaacagactccactgctgatttatcaccaatgataataaattttttcagaatttaaatttatctacagtaagtaacaggcattaataacttggtttcttttttaaataaccagagtctgcaatgccttggtttatgcaaaagcagacaggtcaggcccatctcctggctgggtaacctttttttgccactgatccagcccttaaagtgagtcaagttgtttacttgggggtccatggatgagctacagagattagtctgtgaatatcctaaaattcagtacaactgtgagtttacgtaaattttcacataatttttatcaaaagaagtttgtggtataatggataggtgggcactatagtgtaccctgcagtcagactgcctagatttatatgatgatgggctttgtgagttctattccaaaatacggtaccttggcatattgagtattttaagctgaagaaatttgagaaatggcaggttcaggaaggactctctggccttcccttgaagcaggtcataagaccctcctgtgagagatgctctccctatacccagagaaatggagcattcttctccctgaagatggaggggcgctgaagggaatctgaattaacaggcgttgctcagtttcccccagtttactgcccttagcacctacgcctctgccctgtcacattttcccacaactcttcatcaaacctagtataagaaaacactcaggtttaatcattttttaaggtattcatttcttaatgaagtctcccatgtcacataatacttttttttttgagacggagttttgctcttgtagcacaggctggagtgcaatggcacgatctcagctcactgcaatctctgcctcctgggttcaagtgattctcatgcctcagactcccaagtagctgggattacgggtgccagcaaccacgcccagctaatttttgtatttttagtagagacagggtttcaccatgttggccaggctggtcttaaactcccgacctcagatgatccacccgcctcagcctcccaaagtgctgggattagaggcgtgagccaccgcacctggcacaaaatacttctgttacgtaaatttgtatgcttttctgttgttacagagccacagctaagaacctagaagggtagaagcaaaagatttttttcctcctgtataatcccaatccactacttaggtaggtgacttcaaacaagttacttaacctctctctgcttcagtgttctcaaaattgcagaaacgatcttataggactgctgtgatggttaaatgtgagaattttgagggcacagaaaactcttaatgaagtggcaggtacttagtaagcgtcactaaattttactaattacatcacacagtcggccctcctcgtccacaggttccatagctttagattcaagcaaccttccaacaataaaaataataatgcaacaattaaagttgtattaattaaaaatacggtataacaactaatagcatttacattgtatcagatattacaataatctagagatgacttagtatgtgggaggatttacgtagtttatatgcaaacactacaccattttatattagtgacttgagcatctgtggattttggtatctgaggaggtccaggaaccaattatttcccagggatgccaagaggtgactgtattctcaaaataatctgtaacctccaaaaagttaagagacactgagctatgatatttttagaattgtgttttaaagaacaaatcagtacctgatttaataagtcacactcaagcttaattcaaacagaaatattaatttgcaaaatatacagatgcatattcatcatgaggcagaaaggccttttaaatagctttgaaaatgtggaacatcaatttgtgttgttcttccatgggagaaaaaggattactaagtctcaggtaagcctccaaaaaatatttccatctgcccctggcttccgtactatccaagcttgtcttgaaaccttgaaataaatttcaaggtgacaacctaaatttaactctgcggtagtgggttgtggatttctcagcattttcctttttagttagcatggaagtcaaaagttacaaaagcaatgagattctgcatcttttaatgaaagataaaacaacaatataaacatacacaaatttacagagaagggatcaactttaatacatttggagtaaaaggtgtttcttctttaaatatggtataaaaataaatgcgagaaacattaacggagaatgtacagacaacagacgaagacatgagtttgtttctgactgtgacacattggtgaaatgaaactttctgtgcggaatttattgtttaataaatgtgaagccacatgtatacttattgatatatacttttttcttttacagttcttccagtttttgactgactgaattttcagtgaactgtgtgtctaactgaagctttgagagagagagagagagaaagaaggaaaaaaagaaaaggttttacttcacttgaacttgttaaaaaggaagagacacagatccagcatagtagaaggagaaagaaagcagacaacagtttggaatggaggcattgagacggaagagtccattggagatggaatgtacacacaaaaataacaatttaggtcctttgctcatgcaacatcttgttctaatgtcctctgctccaggtcacaacattgagctacaaagtgtgtgcagtgactccagtctgcattcatgctacaagatgatccgtttagtaagactgagcaaggcttgttaacctcttggacgtgagagatttcccctgagaaaatatataaaacaagagaaaagaaagaaaatcaagtacgatcactgaaaacctgcttagtagtagcaactatttactgtagctgatttttgtgcaaggtcaacactgaaccctttaagtccatcttagttcaaacctcatgaccaacctgccttcccccctccctccctccactgacacgtcaaacaaaactatcctccctccctccaccctcctacccctcccaaatccttcctccccactgcaaacagactgatggtttcacagcacagattagcaaatcataaaacatatccataaatgctccatcaaggcttagcaatgaagcaacacctaggttcccaactgattataaacatgttacaacaaatcttagtaagctgctctgaaagataatgtgagtgcattcttgttcaatggctgaaattaatgtcacatttataaatatctagaaatgtagaggatacgatttaattaaataaaatgcagtttttgagggtgtgattcatgaaactcaagattgagtctgttccctatcttacataataatggataaaaaggtgccaattatatatctgaagataaaagtctacttgttccctgtttctagctgttgatgtcttcctgttctttcctacctgacttcttccaaccctaatacaagaaaaaatctgttctattctgattccacaaatcatatgattacataaagcacatacttatgttttagaaatcttgtaagtcaacagtgttgctgttaatcacaagtactctagagagataagaaatttgagaccgggcgcagtggctcacgcctgtaatcccagcattttgggaggctgaggtgggcagatcacctgaggtcaggagttcgagaccagcctggccaacatggtgaaactccgtctctactaaaagtacaaaaataagccaggcgtggtggcgggcacctgtaatcccagctactcaggagaatcacttgaacccaggacgcggaggttgcagtgggctgagatcgcgccactacactccagcctgggtgacaagagcgagactctgtctcaaaaaaaaaaatagaaatttgaaacgtttgatcggaatgcaaaactgctggttttcatttcatgtcttattttatatgttctattataaaattatgtgggccagttatttaatgaatttttgtacatctcagaagataagtaaaaattaaaaaattggaaacatatattttagtaataaatcacagtcatagcaatactcttgatttgctacctaatgtggctcagttttagaaaggggtcagcggtgatgggagatacatcatcactcatggccattgccttagtctgtttgggctgctataacagaaaacgatagactaagtggcttataaacaacagaaatttatttcttataggactgggaagtccaagatctagacacttatagattctttgtctagtgagggccttctccttggttcatcaatggtgcattctcgttgtgtcctcagataatggaagaaggaaataagctccctgggacctatctgataaaggctcctgttcataagggcttcaccttcatgatctaatgaccttccaaaggccctaactcctaataccatcaccttcatgatctaatgaccttccaaaggccctgactcctaataccatcaccttcatgatctaatgaccttccaaaggccctgactcctaataccatcaccttcatgatctaatgaccttccaaaggccctgactcctaataccatcaccttcatgatctaatgaccttccaaaggccctggctcctaataccatcaccttcatgatctaatgaccttccaaaggccctgactcctaataccatcaccttcatgatctaatgaccttccaaaggccctggctcctaataccatcaccttcatgatctaatgaccttccaaaggccctggctcctaataccatcaccttcatgatctaatgaccttccaaaggccctggctcctgataccatcacccttgagattaggatttaacatgtgaacttgagcgggaagggatcacaaatattcagttcatagcagccacatttttggaaaaagacaatatgtttaagaaaagattaataattccataatcaacctgtctttacacaccatataattactgataagggcccttttgctgatatgaacagcagcaatgaaaatcatgcaccattttctcttaattttttcttaattgggaaaaagggtccacaacttagctttcagcatctgagagtagaagatattaaagtggtttttgttttgttttgtttttttgagacggagtctcactccgtcgtcaggctgaagtgcagtggcgaaatctcggctcactgcaacctgcacctcccggattcaagcaatcctcctgcctcagcctccagagtagctgtaactacaggcacctgccaccacgcctggctaatttttgttatttttagtagagatggggtttcaccatgttggccaggatggtctcgatctcttgaccttgtgatccacccgccttggcctcccaaagtgctgggattacaggcacaagccactgcgcccggctgatatcaaagtttaatgctggcatttcccactaggcttatgtttattcactttatgggagaaacaacaataaaagagaaaacagtttattaacaacagaccctgctttataaataaaatatgcactcctgcctgctctggtctgtctgtccccctcaaagctcacatgttgaaagcttactccccagtgtgatgctattaggaggtgggggctttgcgaagtgaccatgtatgagggtgaagctctcattaatgggattagtgttctttgtgtgtgtgtgtgtgtgtgtgtgtgtgtgtgtgtgtgacagtctcactctgttgcccagactggagtgcaatggcgcaatctcgggtcactgcaacctccgcctccaaaggcccctacctttggagggcctcaaattgcttgagttgctgggttcaagcgattctcctacctcagcctcctgagtagctgggattacaggcatgcaccaccacgcccggctaattttgtacttttagtagggccagcttttgccattttggccagcctggtcccaaactcctgacctcaggtgatccacctgccttggcctcccaaagtgctgggataagaggcatgaaccactgcgtcaggcctagtgctcttataaaagaggccgaaggaagcttgtttgcccctcccaccaggtgaggacacagtaggaagatggctgtctatgaaccaggaagggggccctcatcggacactgaatctgccagcatcttgatcttggacttctcagcttctagaactgtgagagataaatttattttgcttataagctacccacccagtttgtggcattttgttatagctgactataacggactgaaatgctgcctccacttctatgcctatttcctcatctgtaaaatgaggataataatagtacttattttcaaattttgttgtgaagaatgatacaagtaaattgcttaaaattatttatggatcattttgtgcactcagtttacgttggctattacctcattatactatcattataattattaacactatcattatatgctctcttcattaagatacccaaacccagagtcactattctgactctaaaaggacagaaagttataaattaaaagctaaaatcatactgcttttccaccccaatcctgggcaataagctaatcaaatgatgttgaaataaaaaagattcagttcttaaatacaatgccatttcctgtgtttactactgtagtctctgtgctatgaatagaattgtatacacatgtgcatatatacctattctgagactgaacaatttatatttaaaaagtgcttacttggctgggcatggtggctcatgcttgtaatcccagctctttgggaggccgaggcgggtggatcacttgaggccaggagttcaagaccagcctggccaacatggtgaaaccccatctcttctaaaaatacaaaaatcagctgggtgtggcggggcacacctgtagtcccagctactcgggaggtgggagaatcatttgaatctgggaggcggaggttgcagtgagccaagataggccactgtactccagcctgggctacagagtgagactctgtctcaaaaaaaaaaaaaaaaaaaaaaaaaagtgcttcctctttgtgggatgaaggaaggtacacatcagtacacgttgttgaggcacaggaatgaattcttatatagtagaagactggggaaagatgctgatataaaactgtttcttttaaaactacagattaatgtgatttggttcaaaattctgggaagaagaatgggccgggcgcggtggctgacgcctgtaatctcagcactttgggagagcaaggcaggtggatcatgaggtcaagagatcgagactatcctggccaacatgttgaaaccccatctctactaaaaatacaaaaattagctgggcgtggtggtgcgtgcctgtagtcccagctactaaggaggccgaggcaggagaatcgcttgaatccgggaggtggaggttgcagtgagtcgagatcgcaccactgcactccaacctgggtgacagagcgagactctgtctcaaaaaaaaaaaaaaaaaaagagtgaaatagttacattgaaattggaagccatttgaaactcagatacagtcatttttttatttgaacaatgacatctactgttgtctttatcaatttataaaaaaaaaaaaacatggttctctttctatggttttgtttttattttttcaaatatcctcaaatcctcaaagctactagtacttggcctgatatggacttcattaaaaattggatgatacaagttaagcccgacaaactcttgtcccaggaaataattaaaaaatactttttcatagcagcccagagagaaatacaggcccacagtaaacctggggctttgtgatattagcataacaatgggcaaaaatgagaaaacatacaggtgtattttaacaacaaaactctgtgtggaccaggcgaggtggctcaggcctgtaacccccgcactttgggaggccaaggctggcggatcacctgaggtcaggagttcgagaccagtctggccaacatggtgaaaccccatctctactaaagatacaaaaattagccaggtgtggtggcaggtgcctgcaatctcaactactcaggaggctgaggcagggagaatcgcttgaacccaggaggcggaggttgcagtgaggtgagattgcgccactgcactcatcctgggtgacagagcgagactctgtctcaacaaacaaacaaacaaaacctctgtgtgtggtatagatttatcaaatgtgcaataaggatatttgttttgtatattgagacaactaaaaggcaaacttgggtacaactaacagttaacagatcttgggctgggtgtggtggcccacgcctgtaatcccagcactttgggaggccgaggcaggtggatcacttgaggtcagaagttcaagaccagcctggttaacatagtgaaaccctgtctctactaaatatacaaaaattagctgggcatggtggcggtcacctgtaatcccagctactcgggaggctgaggcaggagaatcacctgaacctgggaggaggaggttgcagtgagctgagatcgcgccattgtactccagcctgggcaatagagtgagactccgtctcaaaaaaaaaaaaagagatcttaagtgcagcactgaggtcaaagcagacagcatggatgcccaataggccatctggattggaagatttacacttggatctatttgtaaaccatgtgcaaatcctgccttattcacatagtggaaaggaaaatgcataagccctactctagtgcacaaagaaatgattgtgtgtatacttttggttgctcactcctccactgcaatgtattaagttaaaaagaacacgatcacttccagggaagtacacgtggtacggtatttgcatgtcagccattttggaacaatcattttcagtgcagttccttggatgctgtatggaaccagctcctgccaatgatcttttcccaatttttccaaattgaagaatctgagaaatggtttttaaaaactattttttaaatttttcgagacagggtcttgctctatcacccaggtcagagtgcagtggtgtgaccatgacacactgcagcttcgacctcccaggctcaagcgatcctcctgcctcagcctcccgagtaggtgagaccacaggtgtgcaccaccacacctcgctgattttttatttttagtagagatgaggtctcattatgtcatccagtctgatctcaaactcctgggctcaagcgatcctcccagctcagtctcccaaagtgctaggattacaggtatgagacactgtgcccgaccaaatatgagacatttttatagctaagttttaaagtcttaattccagaaatgaaaagggctaacaaaccctatcaatggcacttttaaaaaacgaaattgcttacaataattctatgcgaataatacttatttttaacccaatgattacatatgtgttatgtgatttaaactcttcctgtcagattctaaaggaaacagattatagtggaaacaaatctatagagaaagacaaatatactcagaacataacaaaaactcaagatcctgtgagattttgtaatatctggttaatggaaatatgctagaaaaagcagcatataatcagtttcaggacaaaataaacctgagacttcagctggcacgtaagtgaacagagagcatcatcctagtctataatacaataattacataaacaaagagagttctctagtgtgtcacaataaaacttcccctcaaccaaaccaattcctttctgtcctaaatggtttgcagagattttgttataattagggacaacactctcaaaacaaaaataacaacctatgtatttgtccttaacttttccaagtgagctatcaaaggtataaattttaactgactttaaaaacatcattcttggcctgggcacagtggctcatgcttgtaaacatagtaccttgggagactgaggtggatggatcacttgcagtcatgagtttgagaccagcacggccaacatggcaaaaccccatctctactttaaaaaaaaaaaaaaagcagggcatggtggtgcgtgcctgtaatcccagctacccaggaggctgagacaggagaattgtttgaacccaggagacagaggttgcagtgagccgagattgcgccactgcactccagtctgggtgacggagcgagactctgtctcaaaaaaaataaaaaataaaaaataaaaaaaaatcgttcttggtcttaaagtaataacagaaagttgatggtaaggagccctgagtcagtaggaattgatgaaggccaggctcttagctatagcctgagagcctggggcattagggagatggaagcaacttcctacattcttctcctgcaatcccttcttcacaaaggaaatagagagaagctatgtttgctttagttactaagcccacttattttattgctgtcataaaaacacacagaatggccaggtgcggtgattcatgcctgtaatctcagcactttgggaggccgaggtgggcggatcacctgaggtcaggagtttaagaccagcctggccaacatggtgaaaccctgtctctactaaaaaaaaaaaaaaaaaaaaaaaaatagccgagtatcgtggcaggtgcctgtaatcccagctactcgggaggctgaggcaagataatcacttgaacccgggaggtggaggttgcagtgagccaagattgtgccattgcactgcagcctgggctacaaaagcgaaactctgtctcgaaaaaaaaacaaaaaaacaaaacaaaacaaaaaaacacagtagtcttttctagtatacaggacactgaagagattgagcagaaataaaggggcagatttttaaagggtggctatgaaacagattacagagaagagtagaaagttatcaacatcttttagattttttttgaggccgggtacgatgtctcacgcctgtaatcccagcactctgggaggtagaggcgggcagatcacgaggtcaggagattgagaccatcctggctaacacagtgaaacctcgtctctacaaaaaaaaaatacaaaaagaattagccgggcgtggtggcgggcgcctgtagtcccagctactcaggaggctgaggcaggagaatggcgtgaacccgggaggcggagcttgcagtgaaccaagattgctccactgcgctccagcctgggcaacagaataagactccgcctcaaaaaaaaaaagatttttttttttttgaaaaaaaatttaacctccattttcgctatccttttgcaattcctgcttgtttgtctccagccactgcctccgagtctctcccatatgttgctgtagactgggatggatattcttgagtgccttgtaggctgcagagactatggagaggcactggggataagaaaggtaaaatcttatcgttgcccttccactggtttatgtgatccaactgtctcaccagatgctcaaccccacagctatgttaataaaaagaactgaccatatggtggtaaaatgagatgctattggaccagagatagggaatgtttttaggagagtctgagctaaaggatgttatctgtttattattttactctcatgttgaaaaatgccttttccacttattgaaccagggataggcagtgctcttagcagagtctaaactaagggatgctagatgtttgttattttactctcatgttgaaaattcccgtttcacttataaatataaacatctttgcctggatttccaaatccttcactacctgggttccgtggcctttcagactctttactgttacccacgaagtggttctttggctggcccttgtgcctgctgctctctccgctggtcacctgtttgtgcatgtacctgttcagaccctatccactcttcaaagatgaacttcctatctatgtccttgctaaagctttctaactatccctaaactcctccggttccctctttgaattcttcttgctggtagaacctgcattagcacttttatatgccttcttacgtgattttgtaagtcatctggcctgatgaagtgataacggacagctgttaaacattaatattatagcagtctccaaataagtagttgattatttgcaagagctgagctccttggctgcaaatctcattaagggaataaacttctagaaatcagggtaatgagattccaaggtcttgggaaaattaacttttaatttgggggaggagagacatggtggagagagggatgggggtcactggtcacaccctaaatgttaacagattgactaatagaatcagaatattttcaagtaggcaggtgctaagaaggaattcaagctaggctaggtgttagggaagctcttgcacaatttaaatgaaatcagttcttccaggtaaacttacaagtgagtttgctgaaacatagtgaataatttttataaaactgtggaggtgggtgagttcctagaatgttaaagataagctcgaattcttgagaattaagatggcaaggacaagaggaagaggattctgtagttagttttgaaactgtcatatttaatgttgaatgctgaaaaatattctagtactacgtactaaaaagagatagcttatgaacacatatacatttaagtactggtcactagcttcctaagagaattgagaaagaataagtatagccaaatactttcattttcttaaaatatttttccataataaaaccagtatgtgttcactaaagaaaatgaagaaaacatagaaaaaagagaagaaataaatattacttgaaatatgatcatttacattctattatgtccttctacctttttatacacagatacatgtttaaaattttttttacaaaactgaaattatactgtgcatggtactatgtcatattctgaataacgtgtgtattaaagagattacattttgttcaattacccatgttatggatgtttcttcaaaaataatgttgttttaccaactaaatgcattagttggtaaggaaatcaatttagagagatgcaaccaacatttagaaaaaaattaagtacagaatacattttaaaaatcagattgcattgcacataagggaatgtattgttatttcagttctatgtacatataaacacacacaaatacagtttatacagtaaccatatatatgtacacacacacatatacaaatacgcacaaacacatgtatgtgtcgatcaaatgtggctactctgggcacactgcctatggattagccctgctctgcaaggaacaatagaaaaattaatattttttaaaaaatgtgtcaaatatgggtatcattaaaagaaacaaaagccaatgctttaaaatataatttttaacattcgtataacattccaacagtagatatgtcttgatacagttaagaaattcacaattgttgtactttcagattgtgttctatatttgacaattatataatgcaacaaatattttttatatgtgggaacacctgggttttttttaggattaaactactagaacttgaattactgattcaaagtgagagatttttgaccttctggcacattctgtcaaattctattcgacaaaagtgatagcaattcagacttttatgagcactgtatgagatcacctattttcttaacccctttctgatactagatgttatcatattaacaaaacacatctatttggaggaaaaagtgattgtgctgctttctgaattttacttgggtattaataacaataggttttcttttttgttttctcacatatcaatgtactgtttgtatttcttttgttaaaattgcctaagtccctccctcattcttctaatggtgtgttgctcttacgacattatatgtttgcaaggagctccctgtagaccctgtattacattttggtctgtcatagagatgctcctttattcattttaaaaaggagtttaccagatttgagcacaggaacttgctttaaacaaaagaccttcggctacgtaaggcacgcagcaggatttgcagtatctctgtgattgaaaaagagaaagatgtgcttcataactaaacaaacaatgaccttcaaagtgtgctattagggcagtggaattctgtcttcctccctgttccttatggtattttaatcagtaatttgaaagattaaactgatgaaattctgataaaatgtatgtatgatctacatatgataaccttggtttaaagactgagtaacaaagaaatacttcaaaaaattatgtaaagctttaaaaatgagctataactcacaagataaatttagtggaaagaagggtaaagagccaacatacactaaagtgaataagtaaacaatgaacgaagaaacctagcagcaaaacacaaaattagggacatgtaatctcagcacatgagaaaaaaaatccaatttttaaagtattttattttaagccccaaatgacattacatgttgctctggttgggggaagttgatgcaattttcaggttagattttaaaagttataatatatgctggctgggccatatctcaaatattgtgtttggttacgattacgaggcctattgatgaactggaacacatgtacaaagtgagcaaacagcaggatgaaagaacaggaaattattaaatgggacaacattagaagctcactttcccattttaagtgtcactcagatttaatttgctagcaacatttaagacatctttatcaagtgtttttgtgttcagcttaattttcacagaagtatctttttctttttatactcaaatttcgacaggtttattttaataaagtacttaaatgcagtatgccatatatttaattataaacagctatgggaacaaatggaacaaaacaaacaaaaatggactcttatactatacagttcaatgggtggttgcagaaatgtgaggacctaattggacagcagcatctcagctgtgacatttgtggctcttgacattcactgtggagaaagtgaagagcattggtacatctagggcagtggttttcaaagtgtggtcttaaaatcagcagcatcagcatcactgagaattggttaaacatgaaaacacttgaattggatccatcagaaaatgacttacgtagactttctgaaagatggagtccagcaatctgtgttatcatgagcactccaggtgattctgatgcgtctcaagtgagaactgcggatgtttagtaaggagagatcagctgggaatacttctatttgtgtgatgatttttaaactgtatggttttgggatgcttgtaaccaatgcggagcagagacaaagacagaataattctaatgtaatcagagatgaggttacaaatctgcatttgccaagcccctggtgatttttgaggtatggatagttggactacacttagaaaaataatgaagtaggcagggtgtggtggttcacgcctgtaatcccagcactttgggaggccaaggtgggtggatcacttgaggtcaggcatttgagaccagccttgccaacatggtgaaacctcctctctactaaaaatacaaaaattagccaagtgtggtggcgcattgttgtgggaaatcagggaccctgaatggagggaccggctgaagccatggcagaagaacataaattgtgaagatttcatggacatttattagttccccaaattaatacttttataatttcttatgcctgtctttactgcaatctctgaacataaattgtgaagatttcatggacacttaccacttccccaatcaatacccttgtgatttcctatgcctgtctttactttaatctcttaatcccgtcatcttcataagctgaggaggatgtatgtcgcctcaggaccatgtgatgattgcgttaactgtacaaattgttgtagagcatgtgtgtttgaacaatatgaaatctgggcaccttgagaaaagaacaggataacagcaatgttcagggaacaagagagatcaccttaaactctgactgctggtgagccaggcagaacagagccatatttctcttctttcaaaagcaaatgggagaaatatcgctgaattctttttctcagcaaggaacatccctgagaaacagaatgtgtccctgaggggaggcctctgaaatggccgctttggggatggctatcttttacggtcgtagctgtgggatgaaataagccctggtctcctgtagcgctcccaggcttattaggatgaggaaattactgcctaataaattttggtcagaccagttgtctgctctcaaaccctgtttcctgataagatgttatcagtgacaatgcctgcccaaaacttcattagcaattttaatttcaccccggtcctgtggtcctgtgatctcgccctgcctccatttaccttgtgatatcttattaccttgtgaagcatgtgatctctgtgacccacaccctattcatacactccctccccttttgaaaatcactaataaaaacttgctggttttgcggcttgtggggcatcacggaacctgccgacatgtgatatctcccccagtcacccagctttaaaatttctctcttttgtactctgtccctttatttctcagaccagctgacacttagggaaaatagaaaagaacctatgtgaaatatcgggggtgaatttcgcccaatagcgcatgcctgtaatccaagctatttgggaggctgaagcaggagaatcacttcagctggggaggtggaagttgcagggagccgaaatcacgccactgcactccatcctgggtaacagactgagactctgtctcaaaaaacaaaaacaaaacaaaacaaaacaaaaacaaaaaggaaagaaataaaaaaataaaatgaagtagagttttctttttttaatttataaatttgttttttatagagaccagatctattttgttgcccaggctgatcttgaactcctggccttaagtgatccccacaaccccttgcctcagcctcccaaagtgctgggattacaggcacaagccactgtgcccagccaatgtagagattttaactaagggaaagaaaaagaaaacttgagggaggtgatgtaaatcacaccttcaagcaattcactagttgtcatctagaggaagtgcttgtattactctgcagtggcttcaggaaatagaactaggattaatagctggaagttacagaaaagtggattagggaagggatttctaagagatggaatggtctgctgtctacgggtaccacatctcagatactcaggagctgccaaatgctgaatacccatttgtcactgagcctacagaaaagattcttgcaatgggctggggattggacccagggaaatagggacctctaagttcctttcaattctgaaactgcaaaaattttatcattccccagatctcctgaaagtaccttgaagatttacattttataatcagaaaagagaaagctctcccaataatcttttctatctcatgttaggaatatattcttgttagatattaatatgcctatttcaggtgaacagtgttgataatagggacttgtttttctcctttgtagtaactgagcccatgtctattgggtaatttggctgatgaaatagatgaaaaacttctttaataccaaaataaaatctgcatgactcaaagaggcaaaaaactgatgatgaactttttttcccccaggaataatagagcattctagagaatgtgctttaaatttccaacaactgccacagcctattttagtaatggcttctgctggttgaaattacaggaataagtggtgtatttaggattgtccaatgtgtgttcctattattattaggtactggccattgacaaaaacaatgacaacagccatcaaaatatggtgcacaatgaagagggcaggagattttgcccaatctgggcttgtgtacagtatcagccaaaaacatacgaaaaatttaccaaggtgtctgtagatatacacataatatatccatgcttatagatggatgcaatttagataaagatgtctaatgtattgctattttaaattgtctattttagtgtcattgctttctgggtactagcaaaaattatggaaaagaaaaaattacaaccacagcttgtcatcagtataaaaatggctttcttttctgaaagaggtttcataaaagaatgctaatgagtatatatgaagctacatgtgtctttagactaagcaagagaaaaggattttgaaagagatgacttgttgatgacccagggctgtctagtaagtggcctcacaactagaaataattaacatatgactccacttttggtggaaattaaatttggacaccataataaacccaaactttacatcaacaacttccattcatctttttcctagatacttaaaacaaatttataaaaataatgtgcaaatattaccctttagaccgttgatggaattctgcttaactctttttcattctatttgatgctgtttaattcaatgacataaattgagattgagagttgaccatctgcaaggtactgtgccaaatgttgaaatgctaagattacattacatagaagatataagtcctatatctccttgctttactgagctacaattttgtaccataatatgagattcagatcattttgaataataattcaagttcaaatatcaccaaataaaataaaagtgataatgcaacataatgagctaatggtcatatataacatgattttaaagtgagacagtgtgacatttatttttctgctgtcaagtcttccagtaaacttggttcaaaaatgttctaaaaagtttattggtgctacaagtcttcttcttccttcatttcttctattttgccacccaagtttttgttatcatctaatgtgcagatgactacagtagctgctgatgctgcaaacacatcctcctatctctagattctcctagcttgccctcatctgctgtgtagatgatgatggcccacgtgtagatccagagcacaggatatgttcttgattaccttcttctgtactctgcttctctcactggaaacctccacagtagtccctgcccgaatttgccttcttcagaccctctttcttgtgccacctttgctctgtctctctctctcctgcagggccccactgtttagcaggcaggtctcttgctaggccttaactcttcctctccctgcctactctgcactgttttaagagaagctatcatgatttatattaaggaagttcgtggaaagccaaatctgttcactgaacagttaacttgcatgagcagaatgaaccaactcaggtgcaactgttagtagtatctccaaagtagtaatttgtgttcatatctgtccttttgcaaagtataagcttcctatgagcagaggctttgtcttatctatccattctcagaacaaattgcctggcccacagtaggttcccaataactgttttgttgttgttgttggatataagaatctagtagtgcttgaatacatgggtgctcttggtttgtaaacttatcatacagagcccccaggatggtctctggctgaagcctcatagctactggcataaacccaagacttcatattcattggaacacaatactttgggaaatgctgtagaaacttctgcccctggcatatgtagcagcaggggtgacatttcccactgtggggagtgtctactcagcagccccacagcattccttaggaacccccagggctgtatcggacactctgacaaaaacccatgatacaattcagagctcacagaacttgagcagcaacttaagaactaacgatgctgccaggggaaaatgaagatatattgtctgaactcaattaggctacaaggtctgatacattgcacaccaatcgatttacatcatgctgcagggaaactaaaattgttttctcaggcaagttatcatcaccgccagtttcaataaaataagatggatagccatatctgccaactacaaaatgacaaatgagatggtttcaggtccacagcagaagaaagacgagaaaatagttcatctttgagcagacacatttcatatgcttgctggtaatatctatggtggggaaactcaatggtcagtttataaattattttcactgaaggtgtagtaggaatatatatatatatatatatatatattttttttttttttttgagacagagtcttgcactgtcgcccaggctggagggcagtggcatgatcttggctcactgcaagctccaccttcccggttcacgccattctcctgcctcagcctcccgagtagctgggactacaggtgtccgccaccatggccagttaatttttttttgtattgttagtagagacggggtttcaccgtgttagccaggatggtctcgatctcctgaccttgtgatcagtccgcctcagcctcccaaagtgctgggattacaggcgtgagccaccgtgcccagccatagtaggaatttttaagcgtagtttacctatattagtgtatctataatcccaagcaacagaatccatagcactcaaccctaaaataatatgcacaaaggctttctttaaggtaaattcacagggcagagatgtaaaatcaaaaccttccttctcgtaggttccaagtctgcttgtgtcctatgatgagtgttttgtgaagcagataatctgcctcattatgatgggtgtttgtgtcagttgaggatctgactcactctgtggagctcttaccatgcctacaacttcattaatatatatataatctagaaaaagaactttctgaatactctaaggcttgtctctactttattgtggtagagattgatatcaagggaagtgaaagtaaggacagccaagctgtcttttttaaccacaaagagtatcacataacctgacacttagtcaaaacttactacctgttgatgaatgaatgatttagaaactagaataatggtatataaaaacaatgatatcaatgtagcagatgcgtggatcccaggccaccaggtcaattttctctgttgggattatttatggggaacaaatccaatggcaagtttatatgttttctttttatttgtcctaggaccctttccaaaatagcctatttacactaatgtgcatgtaggtccaatcagtaaagtccagagtgttcagccaggagggacatgactcaatcccgaacagaaccaaggtccatcccaaacgtgccaggaatgggcagctgagggactgcccaagtagatttgacactgtactgcactgctcctaccctggctccatagctgggctggggctgtgattcccagacgtggcacctgtattattcacaggtttacactgtatgcagaggggagttcccagattatagttttatacgttttataggttattagaatatggagggaaatctcacactagattttacatttaataaaatccaggtaaggctgggcgtggtggctcatgcttgtaatcccagcactttgggaggccgaggcaggcggatcacctgaggtcgggagttcgagaccagcctgaccaccatggagaaaccccgtctctactaaaaatacaaaaaaattagctgggcctggtggcacatgcctgtaatcccagttatttggaggctgaggcaggagaatcgcttgaacctgggaggcggaggttgcagtgagccgagatcacaccattgccctccagcctggacaacaagagcaaaactctgtctcaaacaaacaaataaacaaaaaaacccaccaccaccaacaaaaatcaaaccaagttaaaaatcatttgaccagggactaaaaagtatccttcaagttttcaacagtgtcttaaaaaaaacaatatgtttcccggaaagtagctacagttcttcactgactgaagactaattggtggtggaggtctgtcattaatgtgtaacacactggttttggaaatcaggaatacaacatctgattcccaccttccagaataagttatttttccctctagtgtatgctcttgcatgaaggaaaaaataaagatacaaaagagataaaaagagataaatggatacctcttcccttgtaaatttacattccatttaaccaagcagttcaattttttatgaaaagaaaatcaatatataactttgattttattgtactttgacctataaaagcaatgaataataaataagcaacaacccaaacgtccattaatagatgatcagaaaaattacagggcatatccattcaaaagaattttgcatggttaataaatagaatcatgtagaaaaatagtcaattatttggaagacatttacaatgcattttaagtgaataaagaatgtttcaaaagaatatttaaatataattcaaattcttaagtatttatatttatttgtgcaaaatgctaattggagctgtgtctgggtagagagggtcatctagaggtgaagaaactgaggttcagcagtttaaatgattttttcttttattgttattataattattattatttttgcagagacggggtcttgccatgttgcccaggtggttcttgaactcttggcctagagccacgttcccgcctcagccccacaaagtgctgagattacaggcatgagccactgcacccggccttaaatgattttttaaaattcacatggctagaatatataggactaggtttcaaacctaaatagaaacacatcaaattccttggcccaggctctttttaccatgttaccacttatatataatctgcataaggctgtattaaccagtaattccacagtgggcttagataaatcatttaattttatttaatcaaaataacattctaaaggaactaagtgttgtatcttctttgttttctatttcaaataagaggatttacatttacatttgctcctatcaacatttaaacaattgagttacagagttaaaaacagatttcggctgggcacagtggctcacacctgtaatcccagtagtttgggaagctgaggtgggcagatcacttgaggtcaggagtccaagaccagcctgcccaacatggtgaaaccccatctctactaaaatacaaaaaattagccgggagtgttggcgggtgcctgtagtcccagctacttaggaggttgaggcaggagaattgtttgaaccatggaggtagaggttgcagtgagccgagatcgtgccactgcactgcagcttgggtgacagagtgaaattgtgtctcaacaacaacaacaataacaacaaacagatttgatcctaaagatcaactgatttcagggccaacccactcctgttaaatttctctcacggagtctccacaacttctggtcattccttgcagtccccagagcacagttaggagctcaatccaccagcacaaatacaccaggacagagagaacgggatagccaaggaggcatcatcttttttctattgattcttttaaagtctctacagataattgtcttcattaagatagagtgaaaatattttcaaaaagagataagattaggtgactccctgggtgttcaacatcaatactttctaatattcatttttacttttctacttttgtagcccagagccaggctgatttaatttccacttcacacaaagacaaaaccagtgtgttacacattaatgacagacctccacaaccaattagtcttcagtcagtgaagaactgtagctactttccgggaaactgatattgttcacacaaagacaagacagaaggtgagtcacacagctggcacttgattatgaatcttgattgaaggtgtggctgatcagtcatcctaccctgtttttcctttgttttctatctgtccctccttaatgtttgcatagcagacagatgctatggtttttcttatcttatcatgttatcttttcttattttttcagacagagtttctcttttgtcacccaggttggagtgcaatggcatgatctctgctcactgcaacatctgcctcctgagttcaagcaattttcctgcctcagtatcccaagtagctgggattacaggtgtgcaccaccacgcccggctaatttttgtatttttagtagagacaggctttcaccatgttggccaggctggtcttgaactcctgacctcaggtgatccacccgcctcggcctctcaaagtgctgggattacaggcatgagccaccatgcccagcagatgctatgatattttaatggctgaaaaagtggtgtcagatttgatgatggtgatgaagaaaataattttcataattcttaaagcatatgaacctttttgaaagagaataaagtcaacttaataacatttaaaggtatgagaggacatagtaacccttggaagaccaaccttaagagacttctctgatagcaagaaaaataaagaaataaaagagtaaacaagacatgaaaaggagctttcttgagacaacaaaccccaatgcgggcattacacaaatgtgagttatttttctcctacccattttgggattaatgaaaagaataagaataatctatgaagagtaatgaatttaaagtaaaagaaaaagcttgcttcgagttccagctctaatgctcaacagctggaagatattggtgaaggtgccctcacctcactatttccccatttttttgtctgtgaaaaaaggtgatacctgcctgactacctcccaggattgttgtgcatgcaaacaatgaccaaaacaacaacaaaacacacaaaaaggagtctatattttttggaaaattgaaagtgcaatgcaatcctcagctgtttattataatttttctctaaagtgctagtaagtatttatgaatctgggtaactaacaaaaactcccctgcaaaagctggctagcaaaatatttttgtctctggggtgaaacaaaaacaacaatgccatttttctaaccttggttataaaaaccctaggctggaacatgtaaatcaacttacaaaaataggcacgcattggaaatggactcagactggggaggtgggtatcatcaggtggcaaggtttatttattttttgtcagttgggagaatgtcaaagagcagggtggatccgtggaaatagcactggggaacaaaatacatttggagtcagtcccagctccttccctaactatgtgactctgggcaaattatgcacctcctttgaccctttaaatttcttacctacaaaatgggtaaaataatggctataataatatctaccttacagggccagcatatggattaaattagataatattataaagcgcccagtgcagagcctggtacatggcagatattcaatgaatgtgagtttttccccattattttcctagactacatatttgtttactattttcccctattccatttctttcttggatactgttgaccttgtagcctccctgtatgtaccagagcaacctgtgtagaggattcctttaaaatatttacataaattccatctttactccagtaagtctatctgattataataaaatcactcattctttatcttccattaaattattttattgatcctataaaggtgtctcataaaatttagtatgtaaagatctaagatgcttgatacagctgccgaccatgaagttataaaatacggaacactaaaccaaggggaaattcagagaaccttttaatttccttactccatttcttcagaataacacccaaataaaggtattaaataaaaaagattgcattttattttcctggatggaaaaggattaacactaagcaacagtgtctgaaagttattattatggtttgtgtgtgtgtgtgtgtgtgtgtgtgtctatgtttgtgtgtgtgtgtgtgtgtgtgtgtggatggtattcaacttcttttccttcagtaattccagttgttttttttttttccacttctctttaagaaggtggttgctcttcttggtctagtgaaatcctgcaaattcagttaaatgtaacttctgggatttctcagattacatatgggccctccctcctcaccctaacacccagtagaaattgtttatctttcccttgtacatcctaacattttgtctataccattgggtacctttgagatcaagctctaccatggatatccaaccttttggcttccctaggccacattgcaagaagaattatcttgggccacacataaaatacactaacactaatgacgaataatcttaaaaaaaaggtctgtgcataatttttataacatctaccaccacagataagcaaaaatgtccttgcattcaaagggttggacatggctgcaagtctatactttctacatggtcccaagacatagcacatggtttagaatagaggtggcaattgtgtgaattttgattgaaggtgtggatgatcagtcctcccttccccttgtttcctgttggccctttcttaaagtttgcagtgtgtgaccatatggtactattttaagagtttgagaagtgggttagatatgatgttggaagaaggacaaccatttgacttcccctttccatcttccccaggttacatcactattttaaattatatcacagaaatttccattgtaatttcaagaacagtatattctgtcagcattacgtttgaaaaggattaacttgaaatgcttcttaaacaatacacagagtacctcacattatctgatagtcactttctccagcaaaatcttggagaattgtttgacattgtctttattgccccatggtgacttatgaggcatgcttcagaaaattctgtattaaagaacagaggttccaatagtgccagccaaaatttcataaaatttatttacaatgtgattaattcctggagtccatcattctccatccctttaattcatgcaatcacattgaatgttcacagtatatattactgttcaaattctttcaaatactctgtgtaccgttgcaatggtaattcacaagtagaaatgagtaacattccccaccacaaggatccttgaaggaaactgaaaacaaaagccattatctttgttgaatccagtttgctcacatttcaacacacataactccactgaactggccatcacagcaaaagccacaacacacacacacacagcagcatggagctaaaccacacaactcaacagacaatgcagacaaacttgagtataaaccaagatttttctacctcttttcataacaggttagtgctggccctcagtgttggtgtacagtttttatggcatgggaaaatagggatgtttctgccctataaaaataaatgtgttgaaggctttagtttgagcttacacaatgtcagaaagttccaaaggcactggcacaatacaaaaaaaagaatcttacaaacaaatatatatcatcaaaacacatggcaagatactaagaaaacactggtaggaaaactactggtttctcaggtgatttatgcaacagttttcaacaccttcctgaaaaataaggaataagaaaggcaggctagtgggtctctggtggggcatatcttgtcaccaaccaccactcatataaaatctttaattttaaactgctcagtagatcattttctctctgcagaagtaaaacgcatagaaccctcattgttcttaacattttaagcctcaggaagggctaagggaaagagcatagaaatacatgcactatctttaataaagaaaggaatacaaggaataaaaataaaatataaagaataattattattccttccttttatatgttgtaatataaacttctttccaaactttaattctgtacagataacttgttcatatataacatctttttctactttggaaagggatgggacagaaagataagcagaaaacatgaagttctgaatttgaataaaagaaacacttttgctgttatatcaagaatgcaaggtgggtaacagggctagaaatagggaaattggaaaaatttcattggacttaatgattcataattcctcaaaaaattaaacttaccacattctgtgcaaatttttcaaaagatgttctgcgatccattgagtttccagacttacgtatgtggggtaggataggatgaagggaaataagggaagattaaaaaaaagaaagaaagcaaggaaaacagagcagaaaaagacaggataatgaaatgatgcaacaccaaatccatgttctaaatcagaaggcccatagaggttggagagccgccaagggaggcttcttctcacaggacatgggctctgcttacaccaaaaactttccttgtacaaacaaaatggtgtgattcaagcaaaatcaaattcagccaaaataaagtggatatgtgaagcctttatactgacatttgcagagcctaaatatttaaaaatctagcagcatatcctcagaatttcctcaaaacttttatgagaaaaaattcctattgacaacatcattaattccatagagcattaatgtctaatagaactttccaaaaggatggaaatctcattctatgctgtccaatacagaagcccctagctgtggttactgagcacttgaaatttggctagaatgttatataattttaattaactaatatttaaacagtcccacgtggctagtgactgctgtactggatagtgttactacaaagtatccatttctagttgtaaaggcaatggacttttaaaaatcttattagcctacatgacgatcatgaactacacaaaattataatttaaactcagagtttcaagaagctatgaactattttaacattaaaaagaatgaatgacgttgatgtttatgtccagattttctcttccctgttatattgattacataaggagttatgaacagagagacattgattattaacattgttgaataatgaggtctactacaatacccccataatgtgcttggctaccatgctaggtgtataaaattcatcacagggatattaagtgattcaggataaatgccaaataaaaatattcggaagcaaacattccgacattttgtcatctattattgaaaaaggtgagtctactttcagttatgaggcctgtggttcaaaacatacattctagcttactaaacaaagaaacctctcttcaagtttttgacctaatgactttgttactttcttttctttattgtaattttgattccatgaaactaggcatacagaagactaacatgaaacatgaaaacagcttctaataaattttgcaaagcatgaacatctgcagaaacaaacaaacagaaagtaatacaataagcaataaacaaacagaaacaacttaaatggcccttataaaatgcaaaggtttgggggagggtcttggagtatgttcacttaccattagtccaataccctggattcagcagaggtaattactccaaataattataactgagaactaggccaagaaaaaacaactcacaaaaaaccagtacctttttctttgcctgtagaagctcctgataggcactggatcttataaaacgtgggtatgaatcacttttcatcagtttgtaaatgtgctcctaaaaagaaataatggttgaggtgcttctttatgatttcttgggaaaagtaaaatatcatgatgtcacacatggctaaagaacaaatctagtagcagcgaaaaatagtaataacaatgctgattagaataccttctatttacaggatatttagatcttcaaattcattatctcattcatagatcattgtttaaattggtttaggagctactgaggaggcaaatcacatccagtcattacaaaaatggaatttgattaataaaatgtcataaaattacctcaaatcaagttgttgacttatatagatcactagagaatataactaaatttgctgtctcttaaaactactccaggcctgaagtgggtaatgttgactcagactgagtaatcatcctggatacctttggcctctacatttactgggagggtgccaactacccagaagaatcaaatcatctctttggtacaaattgcatggaaaattgtcttccatacccactttgggtcagagcacaagtccaaaaataaattttgtgatatttaattgctaaatctccaaatttgtgtgctctttcttattacttacccagtgacagattaggtaaatagttgatcatttgcccctaagaagtttgcaatattctgttttgatgatgaattttgatagacaagtcaaaaaaaaaaaaggaaaaaggtactcattcaattcaatctagacccaatctagggaggttccactctggtctaccgcagctcagggagctaacatgtgccttgatcttccaactctagtgaaatatcagttaggtgtagagcttggaactattggagagcattctgaatgttccagttttcttttctttctttttttttttcttgaagaaaatagatgtttcaagaaatgactccagttctctggtcttaaacacaacagcaataatttgaagttactttaaattcatttaaagacattcaggattaaatctcaagacttagcccaatggtgatcttcaaaggatgttaagtttggaactgtatgggaatttgtttgaaaagtagagcaatggctggttttggagttaagcattttgagattcacattctaccttgctcaagaactaccacttacaaatgggataaatataggccaactttttcatctctctgatccttaattttctcatctataaaatagcattgttgtgatgattaaaggaataataaatgtgtagcaaagcatggggtgtggatagtaagtgctcaaatatacttgggtatatggcaggtactcttttaagtgctttcctgtattagttaatataagccttacaaaacccctatggggttggtaaccattatgtccattttacaggtgaagaaactgaggcgtggagaagtggtcacagagcagagctgaaatcagaacccaggcaatttaccttacgatcagattttttttaaaaaccacaaaaaaaactagaattaaatatctgagcttaactgaaaaagaaatctagggccaagtggtattgttttctatagaatttttttttctgtaagaaaagaggatcctcttaggcaagaatatttttaaatgacaccgataactaaaaaaaattctattttaaacctcaggaagggcattccaaacattttccacattgttggctctagaaagatgctcggcattttatcttggactgaaagaaagaaaaatcagcagagaagtgagcagcagggccagagtttctggcctgctctctgtcctgtgtctctctagagtgtaattatttctacattggagaccatggctgaaccacatgggataggtatccagttagctgttaaaattcatgttagtttactacacagttgctgatttctttaaatgaaagccaaggagaaatatattttctatagagagtggaaataaggaaggatattcgtgtatctcattcttcatcttctatattttattttagtaatgtgtgttttttaaaaggtactttttagaattaatattcttctccaaaagaagtttaagaagttatgaagtatgcacgttctgatttaaaaaccaacttcaacacatcattagggagtgggtgcagtggcttatgcctgtaatcccagcactctgagaggctaaggtgggaggattgcttgagcccaggagttggagaccagcctgggcaacatagggagacccaccctgtctctacaaaaaaaaataaaaaaaaattagccaggcatggtggtgcatgcctatggtcccagctacttgggaggctgaggtaggaggattgcttaagcctgggaggccaaggctatagcgagccatgatcatgccactgtaggtaacagagagagaacttgtttccaaaaataaaataaaataaaataaaataccacattattaggaaacactatcccctcattacaagtttatttttcttcttaagtttcaacattttttgagagaaggcagaaattcaagttgtttctacaaagggaattaagatccagtttgagaaaagatgactgaaaatttgccttaggaagttagaatcagttttccttattttttctttctgtaggctaaaaaattaacttgaaaatttaagaaatgtcagaatctaatgtttgattttttttttcaccagagataaaactggtttgagtttgacataactttaagctaattcagtttgaataatttataataatgaataattcaggaatgtcagagtcttagaatgtctacattgaagatgccttaaagattttaaatctttttaaaaaaatgttttaaaaaatcttttactgaggtggggtcatcattagatggtgtttgctcacttactggggggacaaacagagtagaaaatgaagtaaaagttgtaaaatatttcaaatatgccccttcatataaaaatattcaaacttagaaaatattcccaggttttaaaaaaactattcagtttaatgtgtctttgttccttcctagatcagttagagttattttacagttatctaaattgaaaatgttagaaatagctgccatttagaatgaaaataaaatgaatacatctaacgctcaacttctcggaagcacgtttgtggtgtgaggctcaccgtacacccacctgagcatcttcaaatgtgtatcgtccaggttccttcacgttctgtgtggttttgtcataactcttggaatccaagttaatagcactgggggctccgggagccagaaactcttgccatatttcctgaactcttgagggtacttctttaataggcctctttttcaggtcctccactgccagccagaatctatgcagaatgtgagatcgggtgtttactctgatggcccatcatctgaaaattcttgtgacatttacggatcatgcagttcatcatgacgactcacagccagctcactttctctgagggcttccagtatcagggtggtactgactgtgttcaaaggataatcttctttggaagattattatgaaaaataattattaataaaaatataaaaatattaataaaaatattttaaaaatataaataaaaaatattaataaaaatataaagaaacatgaaaaactctctcttctaagtgtttgttgttaaaagcagatctgtcagagccccgtataacactgattttacctaaggaaagtagcacttctgactgttgattgaaaacaaagaggagtttgaagggaattaaaggtgtgggacatggagcctccaattgggagataaagctgtgcattacactgtgttctttggatgttctgtccatttcagcaatgggggctagtatggagagccttttctgttctaggtggtaagggaattacaaagaagctttgctggagttaaaagaggcctggacataagatcagaaaatgctctggctggaaaaataaaaacaattaactaatgttaaggtaatttaattgagagagttatggaatgaccaaagcagcaagctttcacatggaattatttgaaaagttgaaatgtgtagaggcatcattgcaattcagaagccacggaataatatatactgacttacttctgaagatagacttatttataccatatgtatactgaaagaacctgggagtgtgttttggttgataatagcaagtggtaaagtctagtgagaaggggccacattgtattaatcggttgcatttcttcaatattttgctctaggctagagcttgctggttagatctctagaaataatgtttaaaagataaatgagtatatcataatttgttaatagaaacaaacactctactagaaaaaggagctgctaggactgtgttatcctccataaacactcttactgctctaatagtagacgaagtcaaagaaaggcaaagagggccacagagacagcaaacttcaggctacagagtcttaagagaggcacaggtgatcagcagtaccttcgtaactactaagctttaacttgaccattaataaataatcagaaatcagtaatgaagtgcatgagctagaattagaatatcaactactactcagtctagtgatttttgagttttcatttccagattttgtttttttatagatatatgtagcagaggataatctaagtttgacaacgcctcaaacaggaaactaccaccatgacttttagaaaggaaggctcaagacctttccctcttaaaacacagatttagacactgtgcactctaataggaatactatgcgaggctgggcatggtggctcacgtctgtaatcccagcactttgggaggctgaggcgggcagataacctgaggtcgggagtttgagatcagcctggccaacatggtgaaaccccatctctactaataatacaaaaattagctgggtgtggtggcgaatgcccataatcccagctactcgggaggctgaggcacgagaatcgcttgaacccggaaagtggaggttgcagtgagcagagatcatgccattgcactctagcctgggcaacaagagcaaaacttcatctcaaaaaaaaaaaaaaaaaaagggaatactacgcataatccgagggagcagaagtgttgaaattaacatatgctcaggcaagttcatgccagcacactctgaacacatcaatcaaaacagtctctgtcctcaaagaatgagtagagaaaaagataaaccatttaattggccgtaacaccaggaagtacatgaatggctctctaggaagagaacgaactagacggtctgggaaaggcaagcaggaaagagcccctctgctggggcaagtgctggattggaaaagggggatctagacaaagctattctaaatccagtgacatctgaaatgggcctggaaataagcataaaatataaaggggttgagaagttaataaccacacctacactgttatgtaagtgcaggcactgctctaagtgattcacctatattaactcatttaattcccacagtaattctattaggcaagttctattatttccctcattttagagaagaggaaactaagcatatgaagattaagttgcttatttaaggttgctcactattactgtcacagctgaggtttgctcccagaagatctgcagcagatgacatgctcacaaccactccctcacacggtctttctaacagcatcattgcctttcttattctcaccattactgtaattattgtaatagcttaatagcatggaggagccaggtgcaatggcttgcacctgtggtcctagctactcaggaggctgaggtgggaggatcagttgagcccaggatttcaaggctgctatgagctatgacagtgtctctgaactgcagcctgggtgtcagagaaagatcccatctctcttaaaaaaaaaaaaaaatcctatatcctttatataggtggaagctaagtaagtatttttaatgtctttgattcttgatttcctcatcagtaaaatgggatgataacgcctatttcactgggtttccactggattaattggtttccattggattagttgattaaattaattccgttaatgtatactaatgatataaattatatagaaggcactgaaaagtacttggcatatttttagtcactcaaagataaaaactcatgatattactatgttttcttagcacttgctctatgctatgtgttttgctcaaaaaaaagaatgagggaaatacatcataaaatttcaagtttctgctctctattagggagagcagagggtatatttgaagcataagtagttatcgagaaacagtgcttcttatttttttcctgtcctaatatttgaaaaaaaatgctcagacgagtgacacactcactgatagcaggagggcagctgtttaggtaagatgcacggagagttattttattttaagtgcaattcacagccctgttgaccactggaccattttgtctccttcagtgtgtgacacagatatgtcagtggaagcagagtagggctcagatttggggagcagtggacagtagcttggtactggtttgtaggaaaccaagaatgccacttacatgcaatctgacctccttagccacactttctcggcttaaccttcctcagccacgcttttctcatctataaaatgaggcaatatttacattttatgttgttttggtggttggatgtgtgatgatcagaaataatgaatgcaaaatataacagcatacttataaaagtagtagatataaaatatattctggtgtcttgtaggtattcaagaattaatctacatctttcatttatctactgatctatacttactaaggaaacatatgataggcaatatagtagatactcaagaaatatatgtatatgtgtgtatgtatataatgtgtgtgtatatatataagataatctaatatttcttagatataatcacttagcctagagtctagtacggcatagaatgattaagatatgaaatgattaaagcttgaactaagaaattggcaggaattcaattcatgcctgaaacctagtatgcacatgctatcctctttttccaaaggcatcttctctcttcctgttttgatggtttatctcctccccattgtccagctcttagcctagaagcgatttcccctagtatcccttcgctgatctctaactctgggctaggcatccctctctgcttctcccaactaaacacccatgattttgtgctgtgatttgttttcttgtctgtatctaccaatagactgtaattttaatgagagaaggcgatgtttttatttggctaggtgaggctggtaaggcttattacttatttatttactcatgatgatacaaatgatatcagcatgttttcaaaaacttagagaatgagaggaatgtccatctccctagccactaaaatgcctcaaggatcctttatctctgctttatttttaatgcattctttttttttttttttttttgagacagagtcttgctctgttgcccaggctggagtgcagtggtgcaatctcagctcactgcaacctccacctcctgggtttaagcgattctcattcctcagcctccccagtagctggcactacaggcatgtgccaccatgcccggttaattttaattttaattttttgtagagatggagtttgccatgttggccaggctgctctcaaattcctggcctcaagagagccacctgcctcggctcccaaagtgctgggattataggcgtgagccctcgcacctagccttttaatgaattcttgcactcaattattgacaatgtgacctaatatagaaaatgttattagtagtctcaatacagaactttagcaactttagcagcaagatcttgcaaaagcccaagcatgaagggttcccataaactggaaggagaataggaagctgcatgccagcaatccatgccaggcacacacagagagttacattcctccgggttctgtctgtggtcattttgcttcatccatgcgacatgtgtcagcgtcctacatctttctgaatggtttgggattcctacctgttaaatctcctgaaaagaacgtgaccatgcctggcactacttcgttccaatgaaaataaatgaatgcagagaactttcagtaaatgaattttacaggactgcataagtcatggaaaagtaaaaattgggcatcagctttcaaaagaataatgaatgaaagaactcatgaaacaacagtcttatatagtggaaagttatcactcccttcaatgatgttaaatagagctattaaaatccactctaatgtcttatatttaaaaatgcaattttcagatcctccttatgttagcaagttttaaaaatatataaagatgatgtttacaacagatgggcagaatgggtgtcactctctcacgaacagctcaatgctgtgctgctctcaattgccctgtggctattatttaaacatgcaaagagaatgagacagcccaatagtttggtttcaagttatttgatatagctgcccagtctcttcttctctaacttgcttgagaagtgatacgcaaagatagtcaacaatgacaaataggtgatattttaattgaacttcataaatgttattggccaatctccactttgccaaacattgttctctgtactgcatttctttacagagtccatttcaaagccaccaaatttgtatagttaaaacatctggagatacagagacggcgtaaaaataagttataagaaattgatacgttggacagcctttgccttgctatctcttttcccttcattaggtggcagaaattcaatgggttcatgacatcattatgatgttagtggaagaataattgatctattacctccaaaataaccagacacatcacagacagtatttctctggcttataagatccaagcaatgtgttttaccttaaattttccgagctgaattctgactctagaaatttaaggaactgttctctcccaactgggtctttcaatgcctcgtccatgccaaaaccccatcgttttaccctctgctggctcggttctttgctatagaagataaaacaaaggcaaatacattcctttcattagaattcccatttttttgttattacattccccttcaaaatcatgtgtgcctcgaagttcccatctttaccttttctttaaaaatatatatatccgattaacggctctgcatgaaatcatcgtgtacattagtattaataataaagtctaacatttattgagcattatgtgccaggcactttacataaatggtctctttttgtttttgccaaccactttatgagatagccactattaatcttattattttccagatgaggacagtgaggcacagtattatcacttgccaatgtcaggcaagtaataaggggtaaagatccagatattctgaccccagtgccacatttcttttttcttttttttttttttgagatggagttttgctcttgtcacccaggttggagtgcaatggcgtgatctcggctcactgcaacctccacctcccgggttcaagagagtctcctgcttcagcctcccgggtagctggtattacaggcacctgccactatgcccggctactttttgtatttttagtagagatggggtttcaccactttggtcaggctggtctcgaactcctgacctcaggtgatccacccaccaaagcgtcccaaagtgttgggattacaggtgtgcgccaccatgccaggcacacatttcttaaccactacgccacacagggtcatgcaggtatattgaactggggaaaatgcattggtaaccaaaagatctcaatactagctaatgattctggtgtcaattaaatctgtgacctaatcccaactgagtcacaacattttggggttccagctttctcatctataaaatctttagcttgtggaggaagagttctgggcatgtccagtgtttaagattcatggctggatgcaaaagtgagagagaccagaaatgcaatctagagaactgctagaagtgtgacagagcacccatcttttctttgtaaagtgatacgccatgatcctcttatgagtctgttaagactgatgatgtagttctttccctagatagctcatgaaagaaactatggagtcctaagtggtgctttgcttttcttaggaagtgtcttgccagtttctcttacagtgtctatggtaagctcattctgtcttaaaattgaatttataaagacatacttgtgttgggcttaagtatgtatggctttagcattcactttacttgactacatgagactttgtggctacgtgaattttccaggaagataatagcaatgagctaaatttcaagagctgaagatcctaactctgactaattgcacctctaattttgggacggtctttccagcaatgcaaatcttaatgcaaatgcaaatcttaatgcaaatgcaaatgtctaagtttcaaaagccatgatctcgaacaagaatgttagatataggccaatgtagataaagaacaaaattacattcacaattagccaacaataaaatccttcccatttcactcagaccctgaaataaagcaacatatgggcgagaaagataaaatgccacctaccttgcctcaagttcccagaaagtggtgtcatcggacagccatgggttagaagggtcaggtggcaaaagaaacgggtcgtattctaaatactgttccgtgtaacttagtagactaaggagaaaaaacatttccagtttctttagttttctgactggggttgcagccagtccaaagcagggaaaacaatataaaaatgtgggaccaaggaatccttgttcacttaaagcatgaaatccaatggcaatcttcacgcttcagtaactttcatgcaacaacttattgtgcttcttggcagacaactgtggctaaagattccatctctacccatgcctaagccatgtaaatcagtatcccttggttaacatgaagcactatggaagaggtcagtgtgtgaagggcaccgctaagagtcagttccaatctttggttaatcagtccacccacagcagaacagattttatacaactgagagaagggcttaaaagggaaattttgtcaaaagtatttacaggaattaagtaaaatgggagccactgacaagttttttaaatgtatataaaaattttaaaaagggagaagggaaagaagttggggaggtaggatttggcaatgcccaaaagtgaagaatatgaatggcattaagaacagatttaaatgaagcaaaggaaaatatctgaaatttgagtttcattcatattctgaagtcaggcaggaacagtgtcaattgtcattgttaaaataagtttatagagaggctccagtttgcccaaaggtcatcaataaatggaaagtttcatgtcttccagcaggagtgaaaaggctagactctgcagaattatcctctatatctgattcttagtggaacaaggactggatgtctagacatttaagacaattataatcattctgtcatttaaactacatcaaaagagttctttgaaagtttttctatgtgcaaaaaggaaaacaaaatcacattacttacaggattccaattatctgtcccaactcctgtccccacagttctctttcatttttaaacacatgtaattgtcatatgaaattttaaaatttatacagacactttgaaatactcacctgtcagcgacttttgacatttttaaccgatgtctatctaactgtatttgccaatattttatctgaaaagagggttagagaaggagttacataagtaatgacattttcacaattttccactctaaatcatgatcagctgggcaattctgaacaagagtatagtctacgtcagtacaatttcaaagttggttaaaaaaatagaagcagagggctcttaaagagttaacaaaatgaaatgttggaatttgaacacaattgatatcactttagaagagcaatgagtttgaccattctgcctactttaacaaaatgtgattttattttaaaattgtagagattttgctgggtgcagtggctcatgcctgtaatcctagcactttgggaggtcaaggtgggtggatcacttgagcccaggaattcgagaccagcctggccaacatagtgagaccctgtctgtaaaaaaatatatacaaaaagtagccaggtgtagtggtgcaggtactatagtcccagctactctgggggctgaggcaggaggatcacctgggactctgaagcagaggttgcagtgagctgagatcacaccactgcactccagcctgggtgacagaacaagattctgtctcaaaaaaataaaaaataaaattgtagagattttaaacgttcattcatggtgaatacctaaatccagaatcatacttccctccaaatttagaaaataaatgtatttattactataatttcaaaataaatcctatctcctaataccaagaaagtatcaatgatatgtgttttgagaataattttatcaacaattcatgacaaatgctcacatggaataatcacacacagaaaactttaattaaaaacgctctgaatgacttttccttcctgattattgtaaatatactagaaaagtatattttacactcttgataaactatattataataaaatatcagaggaaaagagtcaaaatgagaataaagccccataactgaaccaatcatgagattatttgatttcagacactggagtttgctttgaaatattacttggagtcaacaccattgatcaaatgctaaaaaaaagaggtagtgtatagcatgactccatggctgtacgccagtggtgataagaaaaaacttcaagaggtagagagaaatcagcactgcagaaagcgagagtaagcactcttgtgaagaaaatgtcctatcattggatgtgggaagtgtgacaatgttctcaacctcttgtcctcttactctttaaaagagagctttggagtacaaagtaactattgatgatggagtcacttacaaatcagcatatgtgatttttacaattggttagaggaacaaggatttgggtaaataaagagtgaggggttttgaaaaccattaccatatattgatacattttcaagtaattacaatacttaaaattacaacattttattatcttttaactgcaaatcttccacatgaaacagtcagtcatacaaataacctataaaaatacccactattaacatttaccctctggttttcatagctgttactctgtaaacctttaacaggtcatctcataggttgactcacctgttgttgtaactcatcttctgttggaggtttagtttctggtgtgggtgtgtgggtaggactgtgacttctaatatcattttgtaaaccatagacagactatattaaaataaaaaataaacattttaggacaaaataccgtttacagtcacagactttctaaaaagtaactctagcataaattcagtaaggtctctcaaagcttatttgattaagcttcttaacaaaattcaaaaggcactgctaagataaaaatcaaatgcatataaaatagaagcacagctcggaaaaaatgtgtagttagattattaactttgacagaataattggttatatgtagagagcaaggtgcatgtgataaaatttgagagcaagctgggaataccaagttggagaatgtcaacactaactaacatttcataagcattgatttaagaaaatagagaggtggatgaagaatagaataggaatgcaataactcaaaagaagatttaaaaataactcgatattttacataggaattaaatggggcactgaggagagtgacaagtcaagaattctattgctgatttgatttctgatggtgcaatagaagacaccagggtactcctactctccatatcaacagtgggttatttacttcacaacactagccttgccattgggtgccatttgcaaacatcagtgaccccagaggcgtcatgcatcttcggaattctcaatacccttgtattttttaattaacttgtcaaaaggtcagacctactacttaggaagactcttttttgagaaaggcccattgcttagtaagtataaataaagatctggtgactaaagggataaaaaactatctgtaactgactatgagacatctcacgtgtcaactcaaggaagaagccaaattatttcttcttggatatcaaagtattattcctttaaaataaagaatttaatgtgtgttattgagcactttttctttggatatgagcaagaaggatgagggcataataaaactgcatgagctccacaaaattagtaccagataaagtttacaaagacacttttgaaattagatgaggttagatccagatgcctaatgatgccaattttcaggcccgtcaccaagcttgccaatatctctaaattcaatgtgtttttattcctgaactgctttcacttggaccttaaatccacttaacactacgtcttgactctgtatctgtcttgactctgtatctgcaccttttggatgtggttttgcccttgtgtctcccgccctccgtcctttttatttttatttttttgagacagagtctcattctgtcattcaggctggagtgcagtggcgtaatcttggctcaccgcaacctccgtctcctgggttcaagtgactctcttgcctcagcctcccaagtagctgagattacaggcacgtgccaccacacccggctaatttttgtatttttagtagagatggggtttcaccatgttggccaggctggtcttgaactcctgacctcaggcgacccatccgccttggcctcccaaaatgctgggattacaggcgtgagccaccgcgcctggcctccgtcctttttttggtgctcttatcctttctttatagattttaacttggacttaatcattggaataatctattcccagactatcttgggtaggcctcttcagtgtcctttcttgccctaccaccagaaccttggaacccaattcccatcactgaggatatccatttcttttttttctttttttataatgccaaacaagaggcaggaaatggccatccatttcaacacaaggatttgctcatatgctttgaatttactctgaacaggacggagctgaatgtcttaaactagcccttttatttcatttattttttcactcattcattcattcattcaacatttattgaacacttactatatactagatatagtactaagcattagggaaatacaaataaacaaaatagatgtgcttctttctgcactgggactcacaatccagtggaagggaaagaagttacacaggtaattacacaaataaacatatgactaaaaaagggagcagtattatgaaacaaaaaagaataacaagcatagggcctggaatataaagtgatttaatttacactgaaggaatggaaatggcccaaactgatactagccatatttgaacatgattaaataaaacaaccttctgaattctgaaataacagtagaggttgatttcttaaaaattatgtgttatatacataatggaacactattcagcctttatagaacaagaaattctgtcatttgcaataacatggatgagcctagaggacattatgtttagtgaaatatgctaggcagagaggtctttaccatagaattacacttatatgtggaatataaaaaagctaaagtagagagtagagtgacagttaccagaggctgggatagggggtgaggaaaagaaagctcttggtcaacgggtacaaagttagttagttaggaggaataagctctggtgttctattggacagcaaggtgactattgttaataataatgtattccatatttcaaagtaactaaaagagaggattttaaatgttcttgccacaaaaaggataaatatttgaggtgacgaatatgttgattactctgatttgttcattccatggtatatatgtttattgaatattacccgataaatatgtgcaattattatttgtcaattaaaattaggcaacagaaagatcaccaattatataatagttctacctttcagtatctgctagtttttcaactgtatcaccttaatttttgagaagaaaaataaaaagactctgagacttgaagtttccattcttttttaacttggtttaattatttaaagtttttaaataataatctacaggtcatataaacagtgcttataaaaaatagctgatggttttaacagtaagtttttaggcgaagattaaaaaaataacataaaagactgctagaaaaacacagcaatttgtggtatcatgaaagtaaaatgatctataagttatcttttatctctacatttctataatgatttcaacatttatgcatttcctgtaaacttcatagaggtccgatacgaggccgggcgtggtggctcatgcctgtaatcccagtactttgggaggctgaggcaggcatatcatgagatcaggagatagaaaccactctggccaacatggtgaaaccccatctctactgaaaatacaaaattagccaggcatggcggcatgtgcctgtggtcccagctacttgggaggctgaggcaggagaatcacgtggacccaggaggcagaggctgcagtgagccaagatcgcaccattgcattccagtctggcaacagagtgagactccatctccacaaaaaaaacaaaacaaaaacacaaaggtcccataagagaccatgacccaaaccattgggaggtgttgcttaaaacatcttccaggagcctggctacttgctctgaagttactgcagagtttccatttcttgtcttacgtaaaagtcaacatcaggaagtctccctttcaccaatctgagtactgttcatttcctggggatagtgatagcgtttaactttgattgttggctacaatgaaaacagccgagaagaatataattttacatatggggattattttatggacaaaggaggcaaagagattaatcctattttggcagacaaattatgaaaattatttgcaatgtaaaaggctttgcatgttttagaaaaaaaatgtattcaaatcgtggtacagggtggggtggcatagaactagaaacaggtaaggttagagaggaagagaaataaaatctcttaatgtcttaatatttgcagctggggaaaatcaaattaactaattgagatccatttttagttttaatagcaagatcatttatttgcaatgctttggcttgattaacacgttcctttattcctatggtgctaagacaagcactttttcatatgcagtgccatctatttattcattaaataaaatagattcggcctcctacataaatctgttcatgtgtgatttcccttgacattttagaagagaactagaaaaattatcccgtttttttttttaggcagggggtgggggtttgctatggtctgaatgtttgtgtctctccaaaattcttatgttgaaatcctcaacccctaatgtgatggtattaaaaggtggggactttgggaggtgactaggtatgagggtgaagcccttgtgaatgggattagtgcccttataaagaggcctgagggagctcgtttgccgattccacgatgtgaggacacagcgagaaggcaccatctttgaagcacagagtgagctcgcgaaagatattaaatctgctggtgccttgatcttggacttctcagactccagaattgtgagcaatacatttctgttgtttataaattacccagtctaagatattttgtcacagcaactcaaacagaccaagaactaagtcagagacagtaaaatagaaaccacaaagtacaagaagcctttctgtgtttctatgtgaaatgtaatctctggggcttttctgactgactggtgtggtagtatttctctttctttcacggttgctcagctgagctagagaacagattgtgaccatatctgacacaatatggaggaagtcagtacacagaaagaagcagagagaaggcaaccagagagagaaatcatgagagagctgggtcgactcacacctctgggcaagcttgaccactgcctgccacaaggtttcagaccatgaatcagaaaagtcccctcttggccgggtgtggtggctcatgtctgtaatcccagcacttagggaggctgaagcaagtggatcacctgaggtcaggagttcgagaccagtctaggcaacatggtgaaaccccatctctactaaaaatacaaaatgagcagggtgtggtggcacatgcctgtagtcccagctacttgggaggctgagacaggagaatcacttgaacctgcgaggcagaggctgcagtgagccgagatcccgccactgcaccccagcctgggcaagacagagtgagactccatttcaaaaaaagaaaactcccctctttattcattttcatttgagcagtttctattgcctgcacctttactataccctttacttgacacacttttgtgttgttctaagacaagagtagtttattctgttcagtaacacattaaaatttaaatgtacacatgctgtatatggagttgaagacatgtccatattttatgcagaaacagctagaaccactggattattaatagcaggaaaaccagacagctaattatacatttgctgttgtttttctaggatgtgcacattagcttttcactgatgctgttaactgtaatatttagtgccatgatgtccaaatgaaggtgacagaggaaaaagagaacaggataggaaatagcttactgttattttgaaatatgggtgctaagttacaggagggagcccaaagtgtgggtccaatcacacatacatgcagatgctcttatcatttccctcaggttttgtgacctaggacccctctagctattgtcctacagaaggatacagcctgtggtggtgaattttgtgtcaacttggctggctcatagtactcagatatgtggacaaacattactgtggatgtttctttgatggtgtttattggatgggattaacatttaaatcaatggactttgagtaaagcagtttgcccttcacaatgcgggtgggcctcatccaatcagttgaagtccttaatagaacaaaggctgacctcccctgagcaagaagggattctgtctccagactgccttttttgttgttgtttgttgttttgaagaacaaggatatttactcttaaaaaagaagcgctgtcccacaaaaagatgtacagatttgaaaaacacttattttactgtattaaaaaacaacaacaacagaaaaacaggcaggggatgtctagatggcagaattgaagcagctctgtacgaaaatgaagatggtacgatgatgtgacttcaaagaaaatgactaaaacaaaatttcacaaacatcttcacgtttctaataataatgcacaaaatatcaaaaatacaaagtctgggtttcttccctgtaggtttatgataaactattaaacttctatttaatgcatttactttcataagccttctttgtttagaagtacaagctatacaagtacatacatgctggtattttaccatgaaaatttcacttttcatctcaaactagtgatttgtcttcttacccatacttatatacatttcacttccatcataagacatgtaatacatttctagtggtacattttaatcaatatatattttttaaatattgatttttaaaagaatctttttagtgctatgatacgatggccttaatttaacagctgaagcatgatatggtaactacactgtactgtttaattttcagctgtaggaaaacatttgagttttaaaatataaccaagatgaggctggatagtaataaacaccgaaatactagaaaacagtgaacgaataaataatacattttttttcatcaggggctattcatcattttgtttttagaaacctggaagaaattgtcttgagtttcaaatgttctggtaaatctagtcgtttcttagcctcctcaatgtcacctggaattgctgaaataagtgagtctaaagaatcaaagttcttttctggtctgaggtagccaacaatggccacattggggatttccccatagaagtcctctttgaaggtatgcaggataagcgtgtccatggacttcttcgtattcttgtggtagagggtccatcctatgctcaccaccacctaaaggccatctccacttccgacactggcccaaccataataaatgccaatggatacatcaactggaagattagctactacttgttctggaaaattagctgcggagatgcccagcggcctggagccacggccgaagccccgcaccacttgggcccggcagaggcagggcagatgcctcacgttatagtccagtccgctcaggacacgggctgcggccgggtccgcgcgttctacggagccgccatcgacgcggtgcccggaccctggatcagcaaggggtggggtggggacatggccgtgagctctgcctgccgcgggggcgcaccaggggcctggcgacaagacgacacgccgcggtgggtccctgaggcaaccaacccaacaaaagcttcccggcgactcaagagctgtgtctccccagactgcctttggatttgaactgccactcttccctaggtctccagcctggtggcctcccccatgagattttgaactcgccaagcctcagtaatcctgggagtcaatgccttaatataaatctctgtctctgtctctctcccccctcccgccccccactctgtctctggttcggtttctctggagaactctggctaatacagaatctattacagtaaaaattttagtatcggactcaagaacatcagaccgacagttccccttcaaacttacttagattaggctgatttctttctggctatgctacattatcattctttcacagatccttgagataatacatttttacctatttccttatattgtagtaaagtatattctaattaaaaagaaagacttgaaaatagactaattttagattcttaacatatctcaaatcatgcatacagcaaagccttcgcttcctatatttgataaacatgtcaaacattcaacaattagatacaacattcccaaatgaaatgtgaaatgattctgatattcttcaggcacctatgctagattgttactttagggatttactgggtcctttattcttgtcacggcacgtaattacaggaaaaattattatagctcactcccaaagaaatgaacagcagctctccttgctacgagcattatctgctttcaaagtttaagcatgttccatagcttccacttcctgagcagccacagtataaagatggaggccgaccacacagccaggaggaggcgctacagagacggctcaattatggcggaagggaagggtggcttccaggggcaactggctggcctctgccatttctgtctgtggtttgtgatctcacagcgtcacctgctccgcagatacagagctgtggacccctcagagggtggtgaaacagcttgctgattgctgtcaaggtattcactgacaaaatgcagtggcaatcacaagcacgaatcacgtacactccctttgtcatatgtcatggacggagttgtgtcccctcccctaaattcttatgttgcagccctatcccccaacatagctatatttggagatcaggcctgtgaagaggaaataaaggttaggtgggttatagggtgggaactaatacaatagaactggtgtccttttaagaagaggaagagaccccagagttggttgttttgttttgtttttctctctgtctctatgcacacacaggaaaagccactgaggacacgagaagaaggcagccatccccaagcaggaagagacactccacaggaactgaacttgccaccaccctgatctcgaacttctagtttccgtaactatgaggtaacaaattcctactgtttaaaccacctagtttgtggcattttgttaaggcggccccggcagactacatgaagcttaacaaaatcatatacttatatccatgtacagacatttatctccttgctcaacacctgcacccttatgagaccatgaattaggggagcaaggccctgactgtcccatttactgtggagtacctaaagcccaggacatgtctggcatagagtacagactccttaattttgctaattcagtggatcattacagttcctaaacaactatgagctaaagtatcagtggtgatacttctaaaaaatattagtatgtggcttggagtcggataaccttccatgtaaaataacattatcatctgcgaagattctagcaaattgaacacttctgactgtgagaagctacatttatcaaaaggtgagaaaaatccgttttctccaactgtggaaaataagggtatacctgttatttgctgtcagatttttcaggacttttgttttcttctggcaaatgttagcgctagacagctctggagtgaggccctgtcattctgttgttactgattcacaagaaattagatgttatcgagacaaagagagctagatctcaatgactctgtttctttacaatatttcaccttgcaatgcctcatgggcttttcatcattaaatgagggctgatggtatgtaaagaacgacattgtaaactaatgcttctcaagtgttcaaaaagaagggtgccatgtgaaacacgagaaagatgatctatactgaatatggtgccgaagagagagtataaatgatgactttattgtgtctaggtgctatcttgttaatccatatgcattctcttctgaatcacagcatgtctgtgttagggtctgttgggggaaacaggacacccaataaagtatttcgaagagtaatttcactattcagaaagtggagagaggtggcttaatgcactttttggagagccgatagcatttttgaatcttgttctgcaaaaatagttcttggtgccctcaggatgtgctgtgagcagaggatgaaagcaattaagttgggccagccaccagagagacagaccagacaggcttgctttggtctggcttcgcctctctcttggagagttcctacgggcagaagcatttgagcaccgcatccgaattggttttgtggtgctttgcttcagcttctttatcctaacatcaaggtaaactgccttaaaagaaagaaaaggtacttggaccatattggggcctttgaacatgatggtatgtttctagggatgggagaaaatggcaacacaaaataagactagaaaaaaatattgagtgcttactacagggacacagactctggaaaacacgatggctaacgaaatactaaggaaatggccacagaaaaaagaccttgaactttgtggaatgtattaatccagcagcaccaatctataagctgtgttctcaaagcgactgctacaggccagaaattcttgtgtacatcaagcgtgttttatagaatgaataaaaatgccttctagttgtacgtgttgctttaaaaaatatgtagaaactattgctgtgcattttcaaagggttatttaaaatgtcactggactcagaatagcttcccccacaccctgcacaccgatattctctcagataacaaacactgaaatacaaccactgtcttatggttgtatcacaaaattctagtgttaagaggggcccctgcactctttctggaattaaatatcttttagatgtccccctttcctcaggttttaaaatgcccttctctcatcagtatcaggttttctaaagatgatttccttagaaatcctgttcctctcgtctcagtcagtcatgaccaccgctctgtcttgggaccctggtgtgcttgagcattagggtggggctattcttgaggaagggagggctgtggaaggctgggaagagtgggaaagatactgcatgacatgagaagaaagtgtttttatggctgacgtcctgtaaacaatgcaatccatcaccaagatcagcacaacaaatgacagttttaccttccgtgttttgtgggggtttctcattctggatgacttcttaatgtccacttcagttgtatttacacatccaggctgggaatggaaaaacagagagacaaatgaatctttgggtgtgaaatttctgaccaggacaatcatgaatggctcgctctccagagcccgagcaaatgccccaatgacacaaatcaagggaggtgttttctagatggccacagccagtcccatcagcagtagccagtcataaaagacatgatacttcttaactcttcacacttaaaagccttcagatgctatcctcaaataactcccagagaaacaggaaaaagaaatactcggactgcacatgtgaaagtggtgtcaatacgtatagcgacaaacccgacagacagagtgagggcactcctggacaaagagataccccttgctggttttctgcagacagcctctcgcagagatctctctttataaaaagtgaggctgggccgggcgcagtgactcatgcctgtaatcccagcactttgggaagctgaggtgggtggatcacctgaggtaaggagttcgagaccagcctgaccaatatggtgaaaccctgtctctactaaaaatacaaaaaattagctgggcgtggtggcgggtgcctgtaatcccagatacttaggaggctgaggcaggagaatcacttgaacccgggaggtggaggttgcagtgagtcaagatcacaccattgcactccagcctgggcaacaagagcaaaactccattgcaaaaaaaaaaaaaaaaaaaaaaaacaggctgttattagatgggtgccttgcttttcccaggctggaagactaaaatggcatttagttgagccagctcacatcccagaatgaactgtcttacaaggattgtgaaacccagcaactaggaatccttgtttgccatagacagaatgtgcaatggagttcatggttaaaatgtgaaagatggagaaagaaactggtaaataagatgccatgcttcttctgataaattcctgaccttccttttccttaagggcaggtgaacccctttaaaacagaggggttgatgaagtataggcagcctgctgttagcttcctgacaacctcaggtgtctcatttgtcagatttattgttctgttgtacagaaacaaatagatgcaagctccttgtatatttggaggaggagaggggaggagggaggaagaagaggggaagggagagaacatgaatcacgaaacagagaagacaggagattcaaaaatacatagtagcttaaatgtagaaagggcttagacatcacacatcctttagaagtgatgagaagttaatggctacatggactgtgtttcctttacttttggtgcaggatttaacgatctctggtattagtaaaaaacatcggccaggtgcggtggctcacgcctgtaaccccagcactttgggaagccaaggtggatggatcatgaggtcaggagttcaagaccagcctggccaacatggtgaaaccccatctctactgaaaatacaaaaattagcaggacatggtggcaggcgcctgtagtcccagcttctctggaggctgaggcaggataatggcttgagcccaggaggtggaggttgcagtgagccaagattgcgccaatgcacgctagcctgggcaacaagagagaaactccatctcaaaacagacaaacaaacaaacaaaccatcaagttgcatgtctctgctcaatttctctatttcttcccacagactgcaagaaattaaagcattagatgtccttagaagtgactccagagaaactgtgaatacggaaaagtcttccgtggagttggggtggggttgggaagaaagggcaaaaaggcagagctgatgtgattggcagactcagctgttcactacagtaacgggaatcagttcattgtgtaatgaggacagaggacactttccttaaagaaccatctcctgctagtatagccattgggccaaaactccgccataatattataatagataaggaagtaaatgaggaaaacatttttttttgtagaatatgtatatactacagatacacacacacacactgtactacaaacattaaataaattatgagtttggtttgcatatctatttaggaatagaaatcactggttcagcacagtggtcagcttggcagtgtaggagggaggaagggcacccagctgggtgggactaatttcctaagtgacactgagcaattcactaaactctcccagcatctggttgctgagtatgtgatattgtggtttgatttttttttatggttggtctaagcatttgttttttaaaaagacccccggggattttaatctgcagccggagttcacaaccactgatgtaggtgtaacaaagacaaggtttttaaaacattaaaggatcgagttttcactttccattcgatttctatttctttgcagccttccatccctaagcctgagccataacggaagggaaggcagtaaaattctttaaactcctatcaacatatcaggagccaagcacagtgccaggtgcagtggcttatgcctgtaatctcagcatttggagaggctgaggtgggaggatcacttgctttgaggagtttgaggctgcagtgagctgtgactgagccaccacactccagcctgggtgatagggtgagattctgtctctctctgtctttctttttcttttttttaaagagccaagtatgataagatgtgtcatagagattttcttccatatgttaaggggtgggaaaaattaggatataatatccaggaaaaggaaagcatgtttcttcatgacctggaggcaaagaaagataaaggtaagatactgagctcagcaggtgtttcatttttctcctctgtggaagaaactcgaagaagaagaggtgatagggaggaataaaaagtcccagacaagtatgaggaagcctgtgaagtagtcagtcccattcccatagaagaagccccacatgcaatccgagccaacatgaattttatatcatatgggtgttagcaagaaagatgagcttaagaaaatgcttcccaagcctcttatgtggcagtcaagccatccggagtttcttgcatgccacagtagtaaaaggcacagaagatctaagaatagtgggtggatgggagcctgaagttgggacaaaggctgcagtgtgcagggattttatgctggaagcagatgtctgaaacacaaacttcagcagtgagttccaggtgatgagatggtacctgttgcaacatgcaaacctgtctatagcagaaatcgacaaggatctggaagatgttctgggggtgcttggccctctggccccactgcacaagactgtaaaaacaaaacctctagaccccaaactctcttccaaaccaatcctggatagcagcagagaaaggccgagaaaactgaaaatgtaatcatttatccacaaatgaccgagtcatctaaaccaactatttcaattatggtggcatgcagagcacatgcgttgaaacctacccttcaaataggtttctgagaaaactatgtcaattatagaaaataaagaaactgtattttctttatacatctgaggaagctgaactaatttgaactctaaactccttccataaagagctaggattccaaatcaattttacttcataccaggggtcataattaacaaatggccctggaaatcgtgtcaaccattgaaggcataaagtggaaagattcccctccccagaggaacatatctgactgtcagtcctgaaggaaattagaagtttcatcctcatatttaaaagatgatggccttttaaatttgattaatgaaccattagcttacatctgaaattcccacttgagccaattattaacaccactaatcagcaaattaataagaaagcattgattttaaaagtaaatgtcattagagactgaacggtaagatatgttttataacccggctcccatcccaggaaaatgaaatctgccagttcaaagtttgttactaatgactaaatggttaaaatagtaagctggatctgggatgcttgtctcggaggccctgtaatttctaatgaggcctcatgggacagctaatggttcaacagatctatgatatctaagtcaactaggaaattcttgaagattaaaaaagcttagaggcccaaagttgcctggaatacttctgaataattaaggtcatgacccagtgctgataacccctgaataactgctttcagaagtcatgcactgtggtaagtgaaatatggcaataatttttcttgaattctcttatgtattcaataaatatttctttctgcatctaattgtcggatcttgtgacaaatggtgagttacagaaatgaaggcacgagccctatcccagtaacttcctgatacaataaaaacgacagacacatgaataatcagaatatgggagcataatgactaagtggaagttggcacagagcattacatgacaacagaacattccagacatcctttttttttttttttttttcctgagacggagtttcactcttgttgcccaggctggagtgcaatggcgcaatctcggctcactgcaaccgctgcctcctgggttcaagtgattctcctgtctcagccttctgagtagctgggattacaggcgggtgccaccacacccagctaattttttgtatttttagtagagacaaggttttgccatgttggccaggctggtctcgaactcctgacctcaggtgatccacccgccttggcctcccgaagtgctggaattacaggcatgagtcactgtgcatggccaagacagacatccatttttatgcacagtctgttggttctcctcaacatggcaaacactattcctttaaaagttatttttaagcaatttttcaatctcgatgagaccatgttgtctttggttatttaaaaaaaagtcaatcatctttttgatgcatatataataggtaccactagctggcaccagaccttcgtgaaattcgtaaaattggtttctgcagagctaaacaaatctatcttcccaataagatataaataacattaccattaccaagtagacattccattaaaatcttcaaatatatactatttgctggatacagtattaagcacatagtattgttggatgtaaggaataatgaaatgctatttacatcagcctggaagagaattgtgttatttctagtgattcaaagatgaatttcttttcaaccgaactaagctgggttgcaacattattataacgttatttattataaagtaggatttaacattgtggaagccactcctgagggagtaaacggagcatatcattgagaaatactactgtcataacatttacgtgagtgtcctcatgaggtgcaaaagagaagctggagtttttggtttcattattgatattttaagtaaaagcatctaaatgccatttagttcctttcatgcgatagtacatttttgttagttatagcagaaggtacacttgtgttcaagacaactcggcaaagcctgtggtgaagagcgacagtgagagagaggaatacagaacagctgtgtttaagttccatcactgcagctgatgtgtacctgggagaacagtgtcctaaacgacaggtgagtggaggattagaaatgcaccatcaaatagagctgatagcaagacatcaagtacaccctagaaagttttaaaaaatcatgattctgggaaaattcaggtttcaaatatgcatagtccccccttatcctggggggatatgttttactactgcccacccccacaaaagagatgcctgaaaccacggatagtaccaaaccctatatatgctgtttttcttatatatacacatgcttatcataaagtttaacttataaattaggaacaataagaaattaacaacaataactaataataaaatagaaaacaacaataagtaataataaaataataaaatatgccagcctcactgcgcttgggctttggggtcattctgaagtaaagtaagggtgactcgaacacaagcactgcaataccaggacagtcgatctgataacctagaagactactaagtgcctaacaggtgggtaccacagacagcgtggatctgctggacaaaggggtgactcatgttccaggtggggcagaatgggatagacgagatttcatcatgctactcagaatggcacgaaattacaaacttatgcattgtttcttgaattttccatttaatatttttggactgcagttgactgtgggtaactgaaaccacagagtgcaaccatagataagggggagctactgtatttagatggtccctgacttactatggctcaacttaaaatttttcacccttactgtgagtttattagagtattaaatgcatttttgacttactatatttttggcttacagtggctttattgggacataaccccattgtaggtcaaggagcatctgtatatatattaattcaaatagaagtaaattaatgaaaaagagtcaccgctttgtaatacagtacaagttataaaaactgcatgcatgatccatagtaccccagtaagaatgatcccttattcttacatgaagtaattatagattttaaagtgttcacttacatgaagtaactatagattttaaagtgttcagtctcaggacttttttttttttggcccaggctggaatgcagtggtgcaatcacagctcactatagccttgacttcctgggctcaagcaatcctcttgtctcagcctcttgagtagctggtactacaggtgagtgccaccatgtctggctaatattttatttttaatttttagtagagacagggtcttgctccgttgcccaggctggtctccaactcctggcctcaagcagtcctcccatctcagcctcctaaagctctggtattacaggtgcgaagcactgtgcctagccaggattctttttttaaagatccaattcaagcttttcttcattttcttaggcagttgtcagttgattcagcctctgatcctttcagccctcctcctcccgacccatctacttactaagtcctacgcacaaactgaagaaagttgtttgaggaaattgctccaaatttcttccattcactcttctctatagtatttactcatttgattcctattaggcctcatttgctagctacagactcttgggtatgatatcttgcttcagtgtatgctgtgaatgaactccacacatccaagaggcagaaggaaacagaatcatacgaagtcagcctgaagctgtggaaagtgggcaggttgagtagaagtcacagaccatgataaggtggtaaggactttggtttaattctttatttttatttttaaggttttttttgtttgtttgttttgagatggagtctcgctccaccgcccagactggagtgcaggggcgtgacctcggctcactgcaagctccgcctcccgggttcacgccattctcctgcctcagcctcccgagtagctgggactacaggtgtccgccaccacgcccagctaatttttttgtatttttagtagagacggggtttcaccgtgttagccaggatggtctccatctcctgacctcgtgatccgcccgcctcggcctcccaaaatgctgagattacaggcttgagccaccgcgcccagcccgactttggcttaattctaaacataattggaagccactggagagttttaaacaggagagtgacttcatatgatttatttttcaaaactcattcagaccttacactccacacacacacacacacacacacacacacacacacacacaaactcaaaatgaatcataaacctaaatgtaaaatgctaaattataaaatttttagaaaataacaggagaacatctaggtgaccttgagttgggtgatgactttttagataccctatcgaaggcacaatccatgaaagaaataattggtaacttggatttcattaaaattaaaaacttctgttctgtgaaagatactgtcaagagaatgagaagacaggccacaaactggaaaaaaaataggcaaggttattatccaaaataagtaaagaactcttaaaacccaacaataagaagataccacaacccaattaacatatggacagatgatctgaacaggcacctcaccaaagaaaatatacagatggcaaatacatttatacaaagatgctccacatcgtatgtcattgggaaaacgcaaattgaaataacgagataccactacacacctattagaattgccaaaatccagaacgctgaaaacaccaattgctggcaagaatgtggagccacagagattctcattcattgccagtgggaatgcaaaatggttcagccactttgcaagacggtttggcagtttcttacaaaacactctaaccattcgatccagcaatcatcctcattggcatttacccaaattgagtcgaaaacttatgttcacaaaaaaacctgtacacggatgtttctagcagcttgttcttcataattgccgaaacttcaaagcaaccaagatgtcctttagtaggtgaatgtataaactgtggtacacccagacaatggaatattattcagcattaaaaagaaatgagccattaagccacaaaaagacaaggaggaaccttacgtgcgtattactaagtgaaagaagccaatctgaaaaagccacagattgtacgattccaatcatatgacattctggaaaaggcgaaacgatggagacaaatagttttgccttttccagatcagtggttgccaagggttgggaataaataggcccagcacggagaaattttagggtagtgaaactgtatgacactacaatagtgaatacatgtcattatacatttgtcaaaaccatagaatgtacaacatcaacagtgaactctaatgtaaactacagagtgcaggtgataatgatatatcagtgtcggttaatcgattacaacaaatgtaccgctctggtggggttgggggtggggggttgataatgggggcggctgtgggccggggagaggttgctggggaattcagtactttccacttaattttgctgtgaaccaaaactgctctaaaaaataaaattgattaaaaagcaaccaaacaaacaactcattcaagaatattgagcactttgagagtggattatcagggtgggaacagggcaaagcagaagcaaggggcccagtttgaaggttactgcaattattcaggcaagagattatggtgacgtgggtttgcctgccagcactagagatgatgtgaagtggttgcatctgggatgcattttgaagctataatcaacaaaacttgctgatgggttttgtctgtgggcatgctgaaggaaacagaatatcaaggatgactcccatgccatctgctgagatgggaaagcctgtgaaaagaagagaggaatccaaaatgatccctgggttgtatttacatacaatgtttgtatttgctgaagtctccaaagggaatgcaactctttatgcagtctctatgaagatcacgaatcagagcatttccaacacaaatgcctgtataatcatttgcccttggcctgtccttttgtgccattgcgtttttgcattatcactggtggtatgaacatatcattgaatctgcaacattaaaacatgatgatcaattcctgagaatttggtggagctgtctctcattactcagagtctctgctacactttcctaaattttctgtagtcctaccacattctattaatctgctctaattgaaatcagaccacttcagcctcacatctagcaactatctgtgcatccttcaatgacattccctttttatagactaggaattgccttgcaggtaccattctcaaagagcaaccaagaggactctaaccagtacatttgctatagcttctttgtggtcactgggattacccatgtttaatgttcagctttaaattacctaaaatgttcccagttagaactgctttgaaatttaaaaaatcactgggcagaagctaagttgtcataattatctttaaaataggggctcctgcaggaagaaacaaaaggcctgaggcaagtaagcgtggacactttcctgtgacacctggcctgctgtgcgcacatgagcgattgatgtccttccctttctatgattatttccctacaaaaagctggctgcagtgtgaggacatgcaaagagtttcaattggatgagaaaaaaagtctctcttagatttgagactgaacatgtgtgctccaacttgttctatatcctgggttggcatattgggtacttttatacccataattgaactggcattttgatttgcattatactgttcctctggtatttcactggtgggagggtgagtagcaacacagaattttaggattcctggtctgtgggcttaaatgggtcatcaaacaccttaaacatttttactttaacacttaacatgtttcttgaatgcagaaattaagacatgaaatctaggctatgtctctggtgacaacataaatttccccaatgtaaaggtaaggtgccaaaaagtaggaaaatgaactagctactgaactggagaaaacaatctttatttttttacacagtgctattgttagtactggtgacttacatggtatgctgtaaaggctaaagagaaccaaataaaatttcatatagcatcaataactcacagtaaattcaagggcttataataatttttacaacagatagcaatgggacaactaggaaataagtttgtgaaaatcatcacatattggaattaaccttgaattacaatagctgccttgaattcaatagctttgaatcacaaaggatatggggggctcctaaatcataagttcccaaatagaaaaggggtgcatctccctgtcttagtctcttcagacttctataacaaaataccataaaccaggtggcttataaacaatagacatttatttctcacggttctggaggctgggaagttcaagatcaaggcagtgaaagattttgtgttgggtgagggtcacttttcagttcatagaaggttccttcttgctgtttcctcacatggtggaaggcataatagttctctcttggcctcttctgtaagggcactaatcccattcaagaggaaagaaccttcatgacctaatcaccttccaaagatcttagctcctaataccaccaccttggaggttaggaattcaacacatgaatttggggaggacacaaatgttcagaccagagccctccctttacaggacacacatacagagaaaggccataacacatacctcggtttagcaaaatctctgtaaagaagattaatttcaaagatatactctgttgcattcaacttgatttccaaaaagagaaaaagatgtagtggtgttagaaaagagatttttacataaagttcttttctagatttcatatttattgctaagagccaaaattttattttcagtgctagggaaaaaaaatcttttaaaataattcccatgcatcctcgcattcttacttaatcatatccaaaacaacagagtctttcttgatgatttgaggtcgtgattatttgaggacaatgcttattttttattattttttttttttttgagacagagtcttgctctgtcgcccaggctggagtgcagtggcgccatctcggctcaccgcaagctccgcctcctaggttcacgccattctcctgcctcagcctcctaattagctttaggattacaggattaggattacaggctaattttttttgtatttttagtagagacggggtttcaccatgttggccaagatggtctccatctcctgacctcgtgatccgcctgccttggcctcccaaagtgctgggatgacaggcgtaagccactgtgcccggcctattttgctgtctttaagacagcaatgcctatgaggctagatgatcccaactcctaatgccttttgagcttttatgtgattttatgccatttttagttcctctgccttatcccagttagctgtcactttttgctgctctcagcatccttgactccagcgcatctcattattctctaattcgttgcttggttctgatgtggatcagaaaactatacaaatgctcctttgccacagggtctcacattttagcgaatgaaccgatcaaagcacacggttagagtgtgagagtttaaacagctacttcggttaagactttttgagtttatttcttggctgagttttggatagaattagacttgaagatatgagaggtaagaaaaagtctcaaaactgtaacaaataaaatgtggacaagttctcatgatatatttaggaaaacttatcagtacatacatatcatagaagccaattaaagggggtcagaagtagatgacatcaaacatttatctggagttctaagaaagaggatggcatactgagagctagaaatttgttctgtgctccgaggggtggggagaaaagttaactgaggtgaagggcagcattcttgggttgcatctccccagatcctgagtgaacaatgatgcactctcttgtctacacccagattcttttggaaaaagcctgccagattcattgctaattttggtttagtttcccaaaaaggataaagtgtccaagccagaactctcagtttctctcccctcctacctattcttttcttggttttctgcctttcagtgagtgcctccaaccatccatcaagagactcaagccatcaccaaggaggcatcactaagccctcttttccccttacttcccacacttgattcatcagcgcatcatgcaaactttacctccaaatacaccccgaacctactggcttccctccaccctcactgttaccaccctgctccaagctgccatgatctcccatctggactatcacaacagccttcttatttgttctaattcctctcttgctttgtcctccctttccccaagttattctccacacagtagccagagtcacctttttaaactacagcgacatcacatcggtctcctcgtcaaacctccaaagggctctcgtcatgctcaggataaaaggcaaacaccttgccatgctctacgaggtgttacacttttcttttcttttttttttttgagatggagtctcgctccattgcccagggtggagtgcaatagcatgaactcagctcactgcaacttccgcctcctgggttcaagcgattctcctgcctcagcctcccgagtagctgggactacaggcatgcgccaccatgccagctaatttttgtagttttagtagagagacagggtttcaccatgttggccaggctggtcttgaactcctgacctcatcatccacccaccttggctgcacaaagtgctgggatttcaggcgtgacccactgcgcccggcctcactggccttctttgtgtaccaggcccttttctctgtactagatgctacttctttctccaaatactatgtagtccctctcgatcacatcaccttgcttttatttttatcatatcacttacctccacctggagggtttttgcacattacacttgtttgttttctctgtctttcaccactgaggggtaaattcctcaaatacagggacttcctatgtcttgtttagtatctgtcactggagtctgaaatttcctggtacctagtaggtgctcaatgaatgtttattgaatgaatgaatgtgaaagactttttgaacatacccatctattaaaaatacaaaatgagttttattttctgtttgcttgtgtgtatgtgtgtgtgtgtgcatttgtgtgtgcttgagaatgttggtacctataacttaacctcttggccgactgatcatcacctctcattattatcatacatttatttaacaggaaacaaatactccaattcttcagttagccttaaaagaaacatttctagtgcagaaaaatttagctcaaatgttcttttcctgtgcaatgtgattagcccatcagttgataagtgtaaatagcagattgcttccagatttgatgggggttaagtagttaaaaagcaggaagacactgggaacttacaaagcctcagttttagagaagtcaagatgagaatagagcaggcctctctgtccctgcctttataactttgtttaaagcggttcccatcttgacctacaaatatccaaggacaaacaaaatctgtgcccctatgcatttctttacccgggtgtgcaatggcacagcggagttcagacaacacaactgagccatattatacaaccagcacatctccactgggctgtattatggagctgaagattaaaaccccatatgagaaaaacctggattcaagatataaactaagaaaagataaagctaataacgcctcttctattgtgcagtactttgacatttttcaactataaccatcatctaatatgagtttcataagcattctctaaactatatagattagtcactatgaacctaattttcactgaagcatatcaaagattcaaaccttggaagagaatataaatattatctggtctaacttagcatccaattcatgatttcttctggcaacttctacgacaagagtcattcaaccttagctcgaatgcttgttgcctcctttcccctaaaatacctccatctgcatcacacttgaaagaaaatttttgaataagtcatttatttaaaggaccatgccacttttaaaacatgttaataatcatacctaaaaaagacaaataacatgatgacaaactagttaagattcttggaaaagtagaaacttctttaagccttggtgtctcttctttcagagcgagtgcaataaaaattgttccaacctcctcagtgtatgaaatactgcacgtaaaaggggtcagcacagttcttgacacacagaatatgcaaagcacatattagtttcccttagtattagtattattagcagtataatttgacatcaataaaataatcccatagaagcaagggactggttcttctatgatttcagattatgtttgtcaggaatttttttttttttttttgagacagagtctcactctgtcacccaggctggagtgcagtggcaagatcttggctcactgcaacccccgcctcccggtttcaagcgattctcatgcctcagcctcccgagtagctgggattacaggcatgcatcaccatgcccagctaatttttatatttttagtagagaccaccatgttggtcaggttggtctcaaactcctgacctcaggtgatccacctgccttggcctcccaaagtgctgggattacaggtgtgagccactgcgcctggctgtttgtcagtatttgaggaagttgcttatgaaagtaaacaagttgaactatactgaatggaggaaaagcaaaaagctaataaattttagtaattttaggccaaatatcagatttaatttttaaaaaggtaagcattttggggggggaataaatatagggtaagtgtggaggcaagagtgtaaaactcagttcacttcaaagttcttctgatatatcaagccagaccaatacgttggagttgcatttcctttctttctttcttccttccttccttccttcctttttctttctttctttcttttttggagttccattttcttaatggcagttttctttttttcttttttctttttctcataaggggtaactgctaacatttgaaaatatgtggccaagcgtggtggctcatgcctgtgatctcagcactttgggaggcctaggcgggtggatcacctgaggtcaggagttctagaccagcctggccaatatggtgaaaccccatctctactaaaaaaatacaaaaattagctaggcatggtggcgggtgcctttaatcccagctacttgggaggctgaggcaggagaattgcttgaacccaggaggcagaggttgcagtgagctgagatcatgccgctgcactccagcctcgggcacaagagcgaaactctatctcaaaaaaataaaataaaaataaaaataaaaaaagaaagagaaagaaagaaaaagaaagaagaaagaaagaatgaacatatgtaaggacaaatatctttttttcttttttctttttttttgggacagggtcttgctctgttgcccaggctgcaatgcagtggtgtgatctcagctcactgtaacttcaatttcctaggctcaggtgattctcctgcctcagcctcctaagtagctgagactacaggtgtgtatcaccatggctggctgatttttgtattttttgtagggatgaggttttgctatgttgcccaggctggtcttcaactcctgacctcaagtgatcctcctgccttggcctcccaaggtgtcaggattacaggcatgagccactatgcccggcctgacacatatctttatgttgagttttctcttaatgaaatgtaatttgttttgaaaaaatccagttattgattgtgaggaggtatatgcaattattgtgagggaaatagcagagctgaggagaaatctagagttttttgtatttgagagaggatttgctatcttttaaattaatccagattgcttttaattttaatttaattgtctttctcaggaaagagaaaattcatttgaagaagatagctgatgtcctattaagggaagacagcctatcttttctttctttcttttttaaaaatacaatttgtgcatctggggaaaagcaaatgaacagggaaaaaaaacaagctcaaataatgactgctctctgtgaaatcagagtccatgctggtcccgtcagggttctggcagactgagcccatgttgttagctcagccagcccctcaaagcctgtgtgcacgtgcatgcctgagtgtgtttgtacacattttaaatcttagtttcgctttgatatgatttcaaacctacaaggattgcaagagtggtttaaagaactcccatagactctttacccaggttctcctattgttaacatttggccccattttctccccttccttgtctatatttaaactactggcaaacagaaattcagctatagtaggaatggcccaagaggctggcttctcaatagagtatcagggttagatgctccccttccctccccgacacctgcccagacacccacaactatgcaagataccatcagtacttgagatcaatactatcctctatccacttccctgagagttagctgttggctcttaagaccttcctgctatcatcaccccaacccctatccacatcctcatcatttcagaagaaacaggacagaaatctgggctcatgattttgaaaagtcgccaatccacaagggataaaagcaccaacttaataataggggaagcagtttttattctcattctacccatggctcacataaatagcatcagatattacataataataggacactgtatctacaaatctattcagggatagaaagagcagacagaagatgaaagatatagccaggaagcaaaaaagaacagtttcactcatagcggcttgtgatagccagattgtcaaaatatttttcaatccaaaggaacagatgggaataatagacagaaatgctgttccattttcagagcacaaaagaaatatttaaatttggatgaacacattttggattttctaaaacagctcaaggtatcagtaatgagatcatggactattgataggaaagacagcatcatgagtatgggctgatttgaacttaagaacaaaaagcttgcacagttcctattgatttcaacctaatttgtttctcatgaacaccacaaaactgacaatgccaaagattaaaataggtatgtaactgatatcttccaagggaaatattagggaaaatattagggttctcctacagcttaagctccagatgagcacatgaaattatgcatgtggattgcacatcagttacaaaattaaaaagcaacctccctgaaatctatagaatactatacctgctggctcaaacccagaggtagacatgaacatttctaagggatatttatacctgttgcatttacttgacacaatccatgctgtgactcctttccagcagcctagcatggctgataatatgtagccgcctctcagagatgttgggacaatggacatatactgccctttgcctcagagttcaagtagacatgcaaggtgcaatagaccatttaatacataaaaaactcaattaatcatttcactaataagaaataaaaactagttaacatgcacaaagccggtcctggtgcgatataatatcctgctgtgtcttatgaattgacaaagtttgcatcctatgcaatagagatcacatggggttttggagaaaatgctaggttttcagtcatcattagggatttgactcttaaccatatcaaaaccaacaaaacccaactcttcagagtcttgctttctcttatttgttaattaaggaaaatagttacccaccccacgaagtcattgtaaagaataagtggtatgataaatctaaaaggcttttgccaccagaaactgctacacaggcaatcaatgttattgtcatcgatagtaatccacatgcattattgttctcttacattttgtagaaagaaatccaggtggcatgcatttaacatgtgttttagagtaatgtatcctgaagagagaagtagctcgaacagtaaaagggacaatgctggaaattgacaagcttctcgataactgacaaagtcctgttgcctcatctctggccactgctgccttggttggttcaaatattggagccccgtggaaaagaaaaatctgtgtgcttttgaaactaagtcagtatgtatttaatgtcatccaaaaggatgtagataggatgagggaaatcaagaattattaatttattcatgaattcaaaatctatccattgagtgtctgctgtgttcctggtacttgactgaggcctaaatacagagtcagggacaagtgaagcctagtctctgtcttcttatggggaacagttactacctcatatttaccatgtcattcccagtataaaaatcattcataaaaagtactttcatgttcatctcaaaagtttttttccttaatattatgaaagagatgatttgctctgcttaaatattgtggaagttaacctaaaatataagtgagtggtgagagacattctttagtttaggagggagatttggcaaagaactcatgcgccacagctgtgaggagtatacaggattatccccttattcccctcttgatctagggctttgttctcttcctcctgcttacaggttactgtaaggtggttccagcagcatctgcataggtcaccctcttcactgggaagggtttcattcatgctagggcttaacctagttttattttttccaccaccctttccaaattctattttcccagattctactgtggtgagtaccctccataacagtccctattgacctccttctgctggtattctcactctgtgtggtcccctcccacactgcaccagggttggtttgtgtaaccaataaactatgacagaagagatgacataccacttatgagattaggatatacaaacatgaggttttgacatggggctatctttctattttgggatgacatggcggaaactgtcttggacatccttatggagaggtgcatgtggccaggaactgaagctgcctgcaaaccaccatgtgaatgaagtgaaccatcagccccttcagatgaccatagccttggccaacagcttgactgatgcctcatgaaagaacctgagcctgcatcaccaggaaaaccactcctggattcctgactctcagtagctgtgtaaaatagtgaatatttgttgttttattccgctaaattttgggataatttgttatacggcaatagataactaatatacttaaccttcaaacttcaactccaactcttctgatccccaaaagtatttttcctgattataccagttcatagctatctgctaacctttttacccacctcctcatctccttttaaaagcatgattgctaaaataacttcagctaccaattactgaacaagggttgtgtgccaggtactgtcctaagcaatgtacaaatattatttccatgtgttctcaagggtcgtgtagggtaagtatttatttttcccatttcaaatgagaagtttgagacttggaggcatttagtaaaatctcactcaagaaggaagttggtgtttgagccaaatctttttagctgcagttgcatcccttgaacactacatcacataaaactgtcatagctgtgtgagttatcttgaagtctttgtatctgaggcagggaaaatataaatggagagagcctaagcacagtggcaggagtgggaagagaagtgagaatttttatgtaatccatcattcgggcatttagctcttgacacaatgttgccctccccaacttctgtctcactggatatctttagattaaagaaataacataaattttgcatgagacttttcgaaatcatggaagagtatgccaaaaatccataacattaccattctttatagtcaggtttttattatagaaatcaataagaagcctagtacacgccaatttcacctttgaatatgcatgtcaaaattctaaatcaacatacaaacaaaatccaatatcacattaagaaaataacacgacatgaccaagtagggtttatttattctgggatttcaaggatcactcaacattagaacatctattcatagaattcacatattactaacagatataaggacaaaaatgtataaaaagctttagaaaatagttttatcaatcatttctacttgtaaaaacaaatacactaaaataggggttcttattcaggggttctgcaagatcaaaattatttccataaagatcggaagccatcactgccttgttctcagaaatatacagtagattttcccagatattgtgatgacatgtatatagcaaaggaattgaatggagaaagagataggtgaatggagctgccttctagtaagcttatgattaaagtgatttgcaaaagtataaaacagttccactcttcctgctaattttcctttggaaaatgtgccaatttttcattaaaattacactgattattttattaagtgattggtgtcctattgttatcttacatgaaaaaataaatatttaaacagtccttggttttactgttgagtctgataaatgctaatagataaaacttgtataagcaaagacacttcaggacacacaataatttttaggagtgaaaaggaataataagaccaaaaaataataagaccattttcaaattttcagaatttgaaaatgatagctgtgtaagatacaaatgtaaggtccagtttcttaattctatacatagttcctttataaaagatacagcagaaaaggaaatctcatttataacgagaggtttttttttttaagaaagaaacctaacaagaaatgcatgagacatgcacaagaaaaatctaagatgctcctgaataacacagaagttggtaagaacaaatgcttaggatgactcagcttcagaaaaaaactcaattctcccaagttttctataaatgtataacatttgaatgccaaaaagggttcttttctggtgctagacaattgattccaaagatcacatagcaaaataactaggaaaaacctaaaatgaagagcaacaagtaaaaggtgtattgggattgagagggtctagacttatgagacataaaacactaaaatccaaacagtgatgggcagaatgtgatatctccaacccagatgatgccttttaaccattttgttgcctgtgtaaggaactcatcatccatttcctagtacaggcctcgctagcatatttcaatgataattccctaagtcttccctcctttctttcatcctaattttttccagaataattctatcatgtggtgtgagatttccagagaggtgtatctcttaaacagatctattctactttgcctttaattacatgtttcattcaacaagttacccccttcgtttttcttggtttattgtaagttctaccttactcatcctaatggctttcctctgtgatctgttatgttaacctcagggcctggctttgagcagcatcctgagttagtggaaggaatcctgagctgcaattcagaacacctggattcattcctggctcctctcaaagaaaaagaagtcctgggggaaataaaacaaaactcagtctctctacacttcagtttccttatttatgaaatgaggacaaaattaatgccaactgatatggtttagatatttgtctcctccaaatctcatgttgaaagggaatccccagtgttggaggtggggtctggtgggaggtgtttggatcatgggggtggatccctcatgaatggcttagcaccctccccttggtgatgagtaagttcccgagagatctggttgtttaaaagtgtgtggtgcctcccctcctctctcttgctcctgctctcactgtgtgatgtgcctgctcaccccttcgccttccactctgattgtaagctacctgaggcctcaccagacgcagatactggagccatgctgccacagcctgtagaacgatgagccaattaaacctcttttctttataaagtatccagtttcatgtattcctttatagcaatgcaagaatggtcgaacacaccaacctaacagagtaatgtgaaattaagaagaaagtttatatatgatcacattccgcacccgtactggatttaccaagaggcaggaaggtgttgtgataaagagtatgggtcctgggaccagaacacctgccttcagtaacagcttcctcatttagtacttgtggaactttgcacaacttaaatgtcccatgtctgagattccttatctgtaaagagaaaagataacagtaaaggcatatctcattttattgtgctctgatttattgttcttcacaaatattgtgggtttttgtttttgttttgttctttttgcagattgaaggtttgtgacaaccctgtgtccagcaagtttactggtgccatttttccaatagcatgtgcttgcttgctttgtatccttgagtcagattttggcaattctagtaatatttcagaccttttcattattatcgtatctgccatggtgacctgtgatcagtgatgcttgatgttattgtcgtgatcgttttgggatgccacaggccatttcccatttaagatggcaaacctaattgataaatattgtgtgtgatctgactgctgcatcttccactcttcaggcttccctattttctgagctacaacaatatcaacatcaggccaataataaccctacaatgacttctaagtgttcaagtgaaaggaagagtcccaagtctctcaatttaagcaaaaaactagaaaatattaagcttagtgagggaaagcatgttggaagctgagataggatgagagctaagacttttgagccaaacagccaagttgtgaatgcaaagaaaaagttcttcaaaagcacttgaaaagtgctactctagtgaacacacaaatgataagaaagcaaaacagccttactgttgataggaagaggtttgagtggtctacatagaagaccaaagcagccaaaacattcccttaaaccaaaccctaatctacagcaaggccctaagtcatcaattctatgaagactgaaagaaataaggaagctgaagaaaaaaagttggaaactagcagaggttggttcatgaagtttaagaaaaggagccatctccataacataaaagtgcaagatggaagcagcaagtgttgatggagaagctgcagcaagttatccagatctagctaagatagttgattttcgatgtagacaaaagagctttctacaggaagaagatgccatctaagactttcatagctagacaggagaagtcagtgccaggcttcaaagcttggaaggacaggctgactctcttgttatcaggtaatgatgctggtgattgtaagttgaggctaatgttcattgatcattccgaaaattctagggcccataagaattatgctaaatctactgtgcctgtgttctacaaatgaaacaacaaatcctggatgacagcagatctgtttacatcgtcatttactgaatatttaaagcccagtgttgagacctactgctcagagaaaaggattcctttcaaaatatacccactcactgacaatgcacctggtcacccaagagctctgatggagatgtacaaggagataatgttgttttcatacctgctaacacaacatttaatctgtagtcaatggatgaaagagtaattttgactttcaagtcttattacttaagaaatgcatttgtaaggctacagctattgtagatgatcagattcctctgatggaatggggcaaagtaaattgacaactttctgcaaaggggtcatcattctagataccattaggaacatttatgattcatgggaggagtcaaaatcttaacattaacaggagtttggaagaagttgatcccagcccttagggatgattaagggattcaagagtttggaagaagtaatcgcagatgtggtggaaatagcgagagaactagaattagaagtggagcctacagatttgactgaattgttgaacctcatgataaaactcgaacaaagggggagttgcttcttatggagcaaataaagttgtttcttaagatgaaatctacttccggtgaagatggtgtgaacattgttgaaataacaacaaagaatttagaatattatataaacttagttgataaaacgaggacagggtttgaaaggatgtattccaattttcaaagaagttctactgcgggtaaaatgctatcaagcagcatcacatgttacagagaaatcttttgcaaaaaaaagagtcaattgatgtggcaaactttattgttgttttattttaagaagttgctacagcttctccaacctttagcaaccaccgcccagatcagtcagcagctatcagcactgaggcaagatctcccacaaacaaaaaggttacaacttttgctaaaggctcagatgattgttatcatttttcagtaataaagtatgtttaaattaaggtatgtgcattgttttttagacataatgctattgcacacttaatagactacagtatagtgtaaacataacttttatatgcactaggaaaccaaaaaatgtgtgtgatttactttattgtgatatttgctttatttctgtcatctggaatttaaccccaaatatctccaaggtatgcctctactacctgtagttgttgtgattattatatggtaatttatataaagtaccaggaataaaacctggtacctggtgaatgttctctaggcactaataaactaactgttattatctactgcccatctttttccccaacttgatgaagacagaggtattgattctccaatgttgcctctgctctgtggaaaagaacttcagggacccaagaatatagaacctcaccctttcctctcacaatcaaaggtaagtaagagccaaacaagacaaaaaggaaattatcaacataaacattactttcccctggctctaaggcacacaagcagcaactcaagctaagggattcctgggggttttgtgttgctctaagtggcacttttctgaacagtgaaacttgatgaaggaaaagaccaattttaagtcatctggatcacaaccaacattgtctgtgattacccttgtcagtgtgtgttaagaactggtggtgaaatatcaagtattaatgaaggttgctaagtaaccacacaattacataaatcttttcaagtgcatttttgagtatttttaaataatgaggtaaaatgtaggacatcatatgaataactaaggtaatgcaaccacatgcatgtttaaagagatttctaggcctgattttcttagaaaaaaataagtatagtatttcccagggaaaatattgtctgtcttggagaatgtatcagttgcaatcacttctcttaaagtagtaaataaagaatagttttatcagaaacgactacaggggaatacagacatttttagaggaattgcttcttcaagataaccaagcatgttagcaacatgaaataattatagcaaaaattatattatttacattatgataacactctctcaacgacagcgtaagatacaacttcttggtccagattaatacgaaagctacattcccaacatttgagataatgaagccaatgatgggaatcatttgaaaatttaacaacactcctcacagtaacaatagtcagaagaacagacaatatcacttgcaaaaattggttcaatctgtgaactgataaaaggcagcagtcattcattacatgtactaccagatttcaaagcatgttctggccgggcgcagtgactcacgcctgaaaccccagcactttgggaggccgaggcgggctgatcacgagggcaggaggagaccatacgggctaacacggtgaaaccccgtctctactaaaaatacaaaaaattagccgggcgtggtgcgggcacctgtagtcccagctactcaggaggctgaggcaggagaatggcgtgaacccgggaggcggagcttgcagtgagccgagatcaggccactgcactccagcctgggcgacagagcaagactccgtctcaaaaaaaaaaaaaaaaaaaaaaaaaaaagcatgttcttcattttagaaatggcaaatatatgaaaatccatgctgattacgaaacatacaaaaaacattcaggaatgttctcttgggaacacttctggaaccccctttctggagctatttaagagaaatgtcacatatacatttttgaggctgaacaaagataataattgatagagacaatttagatgattgctttcactgtgtgacaatcacaccctggtcttaaataccacatcactggctaaaagagaatcaggcattaattgcacgtgcaagatcacggactttgatcatgggaaaagacggtctaccaaggagcaagcttcactcttgataatacaactggaatttaaatctcaaactttttttctcccctcttggtcatctattcccagtttgcttaatgtcatacaaatctgtaatgtatccaatttaaaaatttgaattcagaaaaaagcgttatgcaccatctctttttattaaattggctggaatatgatgctctcaaatttcaatccgagttcctttactcaataacactccaatttcaccctctcctaatgcaaagcactgaatagtaggggagaagatccaagtaatgactcaggaaaggagacgctacgcctcgtctggacttttcagacggcagagatctccctgccatgtgatgccatccactggacaattagaaggatgaaaacagttttcattcagacaaaatctgcctccttttatccaaagcaaagcaggctaatcttactcctttttccaatgacagctgcttaaatacttgaagacagatgagtaacagcatctaacttctctgccttaagcttaatttttcatgtcctctcacttactttagtacttcacatcccctccccggcctacacgggttgttctgttcactctgctcaaaagatgggcagagtttctacatgttgtcccctaagtatgcagtgcttgggatgggataccatacactctgtgtgttctgactatttccaggcatggcagaagcatgcctaccttcatctcggacgttacaggccaaacaggaggatttaaggatactttatccacaatttttcagagtataaatgtgacatctctttatagaaaattaaaattgcctatgatatcaaatatcccagaatagttacaatcaatattcagtatattgtctcttaactgtttctctaggtatctatttttataaacaaaattgggatcatattacatataacctttttttggatggtagaatcattgcaaacaatataatatttatttattcactcgtttatttaacaagcgcgtccatagattacacatgctgttgcattccagcctgggcgacagagtgagaccatgtctcaaaaaaaaaaaaaaaaaaaggagaaacaaagaagaaaaggaagaaattatctaaatttcttatccaatttcttatatttagataatttcttatatttagataatgtcttccttttcttctttgtttcttcctttttttttgagacatggtctcactgtgtcgcccaggctggaatgcaacggcatggtcacggctcactgtggccttgacctcccgggctcgagtgattttatttcacatttcagcatagtttttctccacatctttccaagtctttaaaattctcattttgagttatacaatatactgtcttgtggatatatcttatttaaccaccccggtaagttgaatagctatgcgatttcaaatgttagctaccctatgtttaaccactctaattttattgtatagctctggacaagttaatctacttgtgaaaaagattttatctttttaattcatattgtcaaattaatttttatacagataataccaatgcacacacccaccatagcatttagaaacacttgtctttctattgctcttgccaggattgcatacaattaatttgaaattttaaaataaaatatattgaaaaaaattgtcatctctttgtcttaatttatgactagaaaggttaaactcttttcccaatttttaatagccatttatatattttcttttatacatggtcagtttaagccctttatctagtttatgtgaaatcatgatatttctgaattgtttaattattttatacattcagaatatcaaaatttatttatcttgctccaagtattttcagattatctctatgcctttcaattatatttttaaacacaaaatcaagtttttaataaaatgtattagcccgcttattttgtgatttattctgctgtctttatgcgtgaaaagttctctagatcctaacattagctcaacgtaaacctctgtttcaaaacagctatattcatagctctactatagatctcattatagtatttgcataataattattcatttacacccccgttctacttattctggactctgagtatctcagtcactggggcagtatttttcatcctcttctctttagcctttagtgtgggaaactataaatgttggttgaaagacatactaaatgaatgaatcaactgtgtaatgcacagatttttttcagtgaaaatcaaagaaatgtaccactttacttctcttattcctttttttcttgccaaactattgtatgaatagtatagttagaaaaatgtattccacaggaataacgatattttatcatatacttgtttgtttaaagtacacaattaatatacaatcatgcctcagaacaacatgtggggtgtccatacaaccgtggtgcaactaatccttcaaaagataattttgaatttttagcattctctgaagaaatattttgcatgtatcaattctcatccaggagaaatcaatggcaggatttctcacaataatcataaggagaaaaatatttctcttatgattagtgtgatttttcagagaaaaaatatctgagtcatttttgtgggactctgcttctttttaaatcacattgatcatgtcaagaatgaatctaccaaataagacaaacaaagccaagcacactgagtaaagtagagaaccaatacatgggctttgtattttacttcaaggtcttgtctatatggcatacaaagacacacagtggaacaaccatcagcttttctatataggtggacctgatgttaggcaagtaaaattcactttatctgctgatatcaccacatgacgctgttttgttcttgtggtcggatattttgttgagttcattatactctcctatgatgtgccctctgtttcactttgtaaaaaagttatatctctatttttttttgttatgtcatggactttatttttgagtagtttaggtttacagaaaattgagtacagagaacagagaattcccgtatgtcccctcatcccaccccaaagtcccctgtattattaacatcttatattgatgtggtacattgtttcagttgttgagccaatattgatacattaatagtaattaaagtccagagcttgcattggggttcactcttggtgctacatacactgtataggctgtgataaatgtataacaatatgtatccaccattaaggtatcttacaaaatattttcactgtcctaaaaatctgtgctcttcctcttcatcatccctgctttcccttcaacccttcatctttttcctgtctctgtggttttgccttttccacaatgtcatagagttggaatcatatgataactggccttctaagactggtttctttcatttgtacgatgcatttaaagtccttccatgtctttttgtggcttgatagctcatcccattctatcattgaaaaacattctgatatggtttggctgtgtccctgcccaaatctcatctgaattgtagttcccgtaatccccatgtgttgtgggagggacctggtgggaggtaattgaatcatgggggtggttacccccacgttgttctcatgatagtgagtgagttctcaggagatctgacggttttataaggggcttctcccgctttgttctgcccttctccgtgctaccaccatgtgaacaaggacatgtttgcttccccttctgccatgattgtaagtttcctgagacctccccaaccatgctgaactgagtcaattaaacctgtttcttttataaattacccagtcttgggtatgtctttattagcagcatgagaatgaactaatacaccttccattgtatgaatataccatagttattttttgaaggacatcttgattgtttccatggtttggcaattatgaataaagttgccataaacatttgtaggtttttgtgtgaacagaactttcctattcatttgggtaaatacgaaggagtgggaatgctatattgtatagtaacaattcatttagttttataggaaactcccaaattgtctttcaaagtagctgtaccattttgcatttccaccagcagagaatgagagttcctgatgttccacatcctcaccagcattggatgttgctagtgttttggattttagtcatgctaataggtgtgcagtggtatgcaattgttgttttaatttagccctaatgacgtgatgttgagcatctttttgccctctgtgtatgttttttggtgcagtgtctgttcagatcctttgtccatttttaattggctgttttattactattgttgagttttaagagttatttgtatattttgaataccagtccaaaatatcagttgttttgctaatattgtcccagtctgtggcttgaattctcataacatcttttatagagtaaaagattttaattttaatgaagtctaattcattagtctttataatatggatatatgatttttttctttttagcctgtagaagtaatcaattatatcaattgattttcaaatgttgaaccagtcttgaatacctggaataattcccacttcactgtggtgtaaaattcttcttgtacaacgctggacatgatatcctaatattttgttgaggatttttgcatctttgttcatgagagacattggtgtgtagttttccttccttgcaatgactttgtttgctttgggtattggggtaatgctagcctcatagaatgagttaggaggtagccactctgctattttctggaaaagattgtaaagaattgatataatttgtccctctttgctagaattcatcagtgaacccatctgggctggtgcttcctgtcttagaaggttattaattattgattcaatttcttcatttaatttactgttttttaaatttttgagacagggtcttgctgtgttgcccagactggtcttgaacaactgggctcaactgatcctcctgtctcggcctcccaaagtgctgggattacaggcatgagccatcactcctggcctaatttctttaattgaataggttaatctttaataatagatgttaagatgtaggccttctcattaatatatataggcccatatatattatctattttcttggtaagttttagtacattgtgtttttctttctttctttcctgttttttttttttttttttcttttggtccatttcatctaggccttcaaatttctgggcatagagttgtttagaatatttcattattatgcttttagtgtcacagaatcagtagatatagacccttttatatttctgatattagtaatttgtgtcttctccctttattccttagttaacctggctagaggattattgactttactggttttttccaaaaaaagttttgattttattgattttctctatattctcttgccattctcattgatacctgctttaatttttatcatttcttctcttctacttactttggatttaacttgttctcctattcctagtttccaaatgtggaagtttagattactaattttagatctttctttcttctagtacatgtactcaatgctataaatttctctctaagcactgctttcactggatcctaaaaattttgataaagcatatttttattttaagctagtttgaaatatttttatatttctcttgagactgcttctatgacccatgtgttatttagaagtgtgttgtttaatctactagtattttgagatattctagctgttctgatttctagttttatatcattttggtctgagaacatactttgtgtgatttctattctaaatttgttaaggtgtgttttttgacacagagtgcaatctcttctagtgagtgctccatggaagcttgagaagaacgtgtattctgctgctgttgtattaagtattctatagatgtcagttagatccagttgattgacggtgaacttcagttaaaccttgttcttagttccttactgattttctgcctgcttgaactgtaaattactgatagaggggtattacagtctcaaaataaaatagcgtatttatccatttctccttgtacttctttcagtgtttgcctcatactttgatgttctgttgttaaatgcatagacatcaaatattattatgtctttatgaagaattgatctttttatcattatgtaatattcctctttatctctgataattttccttgctctgatgttggctttgtctgaaattaatctagctactccagctttcttttgatcactgttaacatttaacttcatattttaatggatttgtacacacacaggcacacacacgcttgcttcgccaggctattctatacaaatttatttgaagaaaaatagatacgtagggacatttatgggactacaggcaagatagaagaaagacaagagaccttccaaatgaataacaaatcctctttcactctctatgccttcctctaacaaactgaccttgtatcagggtttaactattacctttagcttaatgagtttcagaatcaattctatatcccaaaacatccctcaaattttggtctcatgtctacaactattgacaagatctcgctccatctgaatgtcatgtcatcacactcagcatgccctaaaacaaactcactgttccaaatctgctacgaacccttagcaaaatcctttgtaaatttcatatgtccaccattttctcaactactcagactcaatattttgcattaagttgtatgctacaaaatgttaggtttaggatagggaattgaagacagactttctgctcttcaagagatcatggtctgacagatgttaaaacaagtgatctggtcagggtcaacgaaaatgctacaaaatgctgattatatattggttttaaaaagcataaataaatcaactattctcactactttgtgattaggatttgcttaaattgaagtcaggaagaattcaatgattattgtttctatattgaacattctgatgaagtacatttccatttctctgcttaagcatttttatccgtgacgtctttgttgaatgcttggcatgcattcaaccctaaactaatagactggggaagcaaagaaggtgatctaattcttattgcttcagtgctggaaagaactctaaaattatgaatctcattttctatccagtgattgccttttctccattctgtttctggctcatgacttctaatctacttgaatttatcatttgcatcattagaagttggcaatgacctttagatagctttgagtattaggaagcttttatattgatattttattttccagtcattttcatagtagtcatacagaacccaatgtgtggtaaaccaataaactttattccaactctgtttaataacatttcaaaataggaagacactttccatgggaattctcattcctagggtcactaatcttattaataatttcacaatttttttttgttcttgcttttttttagtttgcctccttaccgtccatccattcacctcttaactccagctcatccacattctttttaaagtatggtgcagaggattgggcacaaaatgctaaaattgagtttcttcagcactttgacaagtagaagtttcactgcaatttagctagatgttaaaatcctgttaatacaagctactaacgcattattctttgtgtgtgtatatgtgtggggcttcattaaattattgaaacattaaatacacaagtcaacccaaatactatattatctttgtcatcctacaatttggtgtatttctcccactatattcttcagtagttagtttctggcaattctgtctggagtccttagtaagttaagagtcctttttagtgttatgaccttaatttttttttctggagtaaatgttgacatacttaggaggctaactttattttatagagatattaagtactagaatgattattctgtgtcaatccgacctaaaagtgacctcatggttttttgaaaggtaaaaaatcatattatgtatattttctacactctaggtaaaatgcacataatatatcatattttacattaaattgactttaagtatattttaaagattctgaactgttatttcaaatttccctttcctcactacatttctggctaatggcttccaatccattcttgaggttggaataataaatgctcgtgtcaaatcggatcaaataaaagtattcaaaaggcaaggtagcatatcacctttacttgaattaaaagctttagaaggatcaggtgttacctggtttttttttattgaaaggtgtaatagcagaactgtgaaagggaaaacaaaatgaaaaacattcaacaaaaatgctgttaggataactccatttctggcttttgaaaataaagatactttatatatttatgaaggcaaatcgattcaggaaaatataatgacataacttaaaagtctttcagttagatcgtgtcacagatctgtgatatttaagctttttattctaatgggaatatcaatctcaagacttttaaaattgatagtgattgcttcatagtttttcaattaaccttctgaaaaaccataacaaaaataagaccctactttcttatctctttttttttacgaataatttctgtaaactaaatatgtgtgtgtgtgtgtgtgtgtgtgtgtgtgtttgtgtgtgtattttagagacagggtttcactctgctacctaggctggagtgcagtggcatgatatagctcactgcaacctcgaactcctggccgcaaggaatcctcttagcctcagcctcctgagtagctaggattataggcatgcaccatcatacctggctaatgttttgtagagatggaatctcactatgtcgcccaggcttaaatatagtttatatattttaaaaattttaggccgggcacggtggctcatgcctataatcccagcactttgggaggctgaggcgggaggatcacttgaggcctggagtttgagaccagcctggccaacatggtgaaaccccgtctctactaaaaatacaaaaaattagctgggcgtggtggcatgcgcctgtaattccagccattcaggaggctgaggcaggagaattgcttgaaccggggaggtggaggttgcagtgaggtaagatcgcaccactgcactccagcctgggcgacaacgtgagattctgttttaaaaaacataaataaataaaaataaaaatgtagatcctttttgaaataataacgtatgtaggttgttacacaatattatcatatctaaatattgaagataggacttatcaggcagccctgttggcaatagccctctagggtgtatattgtataaacatccctggcaggggtattctacacatgttagttggattcccctaggtcaggggtgtgtggtctataatatatgaaaaatgccctgaactctggacttttaaaaacagcaaaaggatatgtgaaaaccgttttaaaataccattttaaaatacaacaagacacctataaatacagctattttttcaaaagcaaaaggacatatgaaaaccatgagtaaaatataataagacacctataaatacagctatatcctctgcggactattgcattctatttattctttctttttgcaggatagatacataaagtcaggatctcattcttgctggagctacttacctgcctggacccacaccaccccctagttccaggcctggctctcccaccgctagctctgaacctgagtacgtcctataaacaacatgagcatctgtatctcccttcagaaaacaaatggtgcagtcatactcatcctgctgtgttaatgactatgttcataaaatgcgacactggactacgagttttaggaatcaaggagtgtgttttagtccactctttatgactggccttagtataatatctggcacatactgatatagaataaaaggtatcattacatgatacctttctatattatatccacatgtatcccatgatccatgttccatattatggaagggtggcaacgccctgtttcacgagtttcagattcaacttttgaaggaaacatgttttagtcattgcattggcagatggctccaggacttacatatttaaataacaaaaatgttggggataaaagtattccccaaacagttcaaaaagtttcataggtgggtaaaggaaccatccctttgaagaggaaagtcaacagtctgacttatttcaggtaaacaggttgataaagacaaagaaaggctgctttgttctaagtcttgcgttcctgcacctagaggacagatcccacattccagaataaaggcttaaataaaaatgcaagcatacaggaaataaaagagttcaaaaataaagggtactaagagagaggggtcatagattagcattaacaccatggtgaccacatcagccttaagtcaaggtcagactatttcatgcaagttatccctaaatggaagagtggaatgataaggctggaggaaaaaagagatggctatgggagtggtcttcagagttattctggttgggacctcagaactgaagacaaaggttgtgatgctccttgattgtcctctgtgagattcatagatgtcattaaaaccatgaagtacaggagctgcatttgcattatctgtttccatattccattttttttttgctttttcctttttttttgctactctctgtttcttttcacgaagaaagctgaaaatttattgtctttcacctgtcaagtgagatgctaaagtgatctgctagctgcttttacccatataatctcatttaatgttcaactaacactgcaaggtaggtagatatatttccattttataagtaagactgctgaatcttagaaagggcaaatcactgtgcaaggtgggcctcgtaaataatggactcatgtctatctgattccaaagcccacctgcttcccactctgccccaggtctccctattcccttttttactggttgttggctgacataataaaaactggaagtgtacacaataggacagtctcttagatatggacatcttctggtgaggggcggtatgcaatatcaggccccaggccataccagattaagcctctggacagtttgagatactctctggtattttcctacacgtggtctgggattctacgttgctcaggaggcaataatttggtgttaacatggaagacctagcttcctagcttcacagatcctgtctagaagacacttaaattttacagtgaatactacaaggtacaaagagtctttcattacagccacagtcaggacagactatgaagaagaaactgagctatagaaatacctattcactttaactctgggatataggatttagggtctaaatatattaggattgattatgacaactgcagaattcatttctagggacaaatgtaaaagtgtagacattcttagaaattatcacaatattgctgttttcccctatgccactttttcttgagggggcctagttaccttagaaagttcttgtcattgcttagctaacactacagccagcaaatagagatagagcttatgtgtttggctgagaaaataacataggagctctcttaggagaacctttctgttaatgtccctgtcatcatcatctttgtctattaactcacagtaaggacccaaaagactaaaaacaagataaacaccagtacctgtatggcagacacagcctttggacaagtgtcagcatttcgcaagtgcctgagatcacttcaaaatgtttaaatttttaaaatgccaagagggattacctctaaagtaatacaggaagttataatgttaagaaaaagaaatggttgaaggtaggattggttttaggcgaacgccattctcagaggctcatgacaacccgaagctctattttcctctagaaaataagggatgatggccgggcgcggttgctcacgcctgtaatcccagcactttgggaggctgaggcgcgtggatcacgaggtcaggagatcgagatcatccttgctaacacggtgaaaccccgtctctactaaaaatacaaaaaattagccaggcatggcggtgggcacctgtagtcccagctactcaggaggctgaggcaggagaatggcctgaacccgggaggcggagcttgcagtgagctgagattgagccactgcactccagcctgggcaacagagcgagactccgtctcaaaaaaaaaaaaaaaaagttcaacaagggagatggagccagtggcttctgggtggtttctgcctccagatcctccttgggatgactttctagttggaagcctagtgaaggatgtggtggaggcctcttggataacactcatatgtgctccttgctggtgggagacacgaaagactagcgcccgacttgcactggatagagggaaagacaactttgatcagattctgcctccaacagaggcacacaaagggctaaggcaatggagcaggggagtgtttgaggtgggatcatgtgtcatctctgtgagcatgagagtctcagagcatgaaatagacgtgggcagtgcaggggagctggcatggtgtgagtccttttgggttgccaggaggatccaggtcatggaagctaaacgaggctagagatgagccaccagatgtccaggggacaaagtggataagcacaggaacataacacattgactggtttctagaggttgcttaaaacaaacaaaaaaaataaaaatcctacttaatgtccttgcaatagctatgcacctgacctcataatcctttttcttcatgaacaataaaactcacactgaattttcagtagcaaagccagttaattctcagttgattctctttgaatctttccagaattcaaaagagagaacaaattcaatatagcatttaacaattacattgctatctgaagctgaaatatgtacatatataaacaaacctttggagactttctattttggtctgactctgaaggtagttgggagaaaattgtaaggtattcttatcaatcttgatttgtctttcatgctatgaacctattatttattctaataatacttatataaatattattctctactgccttgtctgtatttaaataaatctacagaagaaaatgatacagcatcaaaatagaaggaaatatacgaggttgtcttatagttgctggtaaccactgtttaatttcatccataaagttttctggtattaattaaggatattcattaatattactctgaggcacgtagtttaacattaataaggaagaaagccagctaagttattagagatccaatgttatgtcattaaaagtgtgagctgatttgaatttgagccacaggaaatgaaagtctgtgaaagtcaacaaccaaagcaggctactaataggttttaagaaagaaaatcaggctgggcacggtggctcatgcctgcaatcccagaactttgggaggctgaggcagacagactgcttgagctccggagttcaagaccagcctgggcaccatggcaaaactccatctctatcaaaaatacaaaaaattagccaggcttggtggcacatgcctgttgtcccagatacttgggaggctgaggtgggaggacggcttgaactgggaggcagaggttacagtgagccaagatcatgccactgtactccagcctgggccacagagccagatcccataaaaaaagagagagagagaaagaaagaaaagaaaagaagagaaaagaaagaaagaaagaaagaaaagaagagaaaagaaagaaagaaaaagaaagaaaagaaaaagaaagaaaagaaaaggaaagaaagaaagaaagaaagaaagaaagaaagaaagaaaggacggagggagggaaggacgaaggaaggaaggaaggaacgaaggaacgaagggagggaaggaaaatcagggcaggaataacacttgtactatgaagccagaaaaatgtaaacaataaaacatgaaaaactgttttgttgcagtagtttttctttcaaatgtatacagaagcatcagataccttcaaatagcaagagagtaagcaagcgatatcatggtgggaaaatgcatggttttataaattaaatacgatgctattgaggtctagtcatcctacacaaaagtggtgatcttttcttaatgaattcaccaagataccatggagcgtgcatggggtcactacagtctttcacttactttggcagggcacccctcacttcccacagacggagaagatggattcaagacgagagtgcgacgcttgcttaccacgggcctgtgcacgtcccagaacgctctctcttggctgtcaaggatcttcctttcaatcttgtctctcttcttgtccactctgtcaacacagtaacaatagataacatttagtattaattgtagtgcctctctgaacaaaaaggccacaactggaacaaatcttccaaacgactcacaaggactcactttgcttgtgcttctgcttgcatgaaaatgaactcccacttccgggcaaatgctctctgcagcctggccaggctctcctgaaaaacataccccaggtgaagacatttggtgttcattgtcactgctctcttctagcttagttaccacttgtatttgtcaaggaaacaaatagagagtttctaaagccctaagtgtactgtggttctcaatgataagtcatgctccctgaattcagctcatcttcatattggcagtcttaaaggaagcagaaaaacctgttacaaatatcgattttttgaattactgactttggagaacaggactacaaacccaatatgtatctgaaaaatactaaaattacctagtacataaggaggtgctcagatgaacccactggatttttcggtacccactttatagaggaacagaacatcagtacattcctactacgcatgcaatcagcctattcagttcctgacaatacatggcacaccctggcggcccacaacctattcctacacagtgctttgaattcagaaaatctaacatagcaaccatctgcacaaatgacagcagatgacttttatctgctgaagatcactgtcagcagagacaattttggcaaaacccactctttcccagggtaaatggtctttaatcctcagagtttggatatcttcactatgtaggatgtatctgacatttcgacagttaagtcgattttagaaaataagatatgcttcccttttatactttgagtttatgtatttagagttttgccatatgcaatgtgaatgaagagaggaagtaagcaaacagggattcatgcacccactgtgatgccagatccctagaaatctgacccttcagatccatgaatgaggctgggcgtggtggctcgtgcctgtaatcccaacactttaggaggctgaggcgggtagatcacctgaggtcaggagttcaagaccagcctggccaacatgacgaaacccagtctctactaaaaatacaaaaattatctgggcgtggtggtgcacgcctataatcccagctactccagaggctgaagcaggagaatcacttgaacctgggaggcagaggttgcagtgagccaagatcgtgccactgcactctagcctgggtgacaagagtgaaactccatctcaaaaaaaagaaaaagatccatgaatgaagagttaacatcctgcccagaaaaggctgtgggccttactgctgtgcattctatgactatctttgccagaaggtccttggtacttacagcctcatagtctgcgagctccagtcgtgccttgttttgcattgttctcttgcagaggtaaacggctgaaaaaaaaatcaatcatttcttgcctgcttatcaacaccatggcactataagtaaaagtacaacattacaaatcaagggcattgcacttttttcccaagttgtaatttttgatcattttcttagacaaaaaataattatgtaataacattattactgaaattcaagcatcatagtatttatgataccctaataaaataaatatgctaagaaacttggtaacttttttttttcagagatggtcttactctgtcaccctggctgaagcaagtgtagtggtaagatccttgttcactgcagccacacactcctaggctcaattgatcctttcgcctcagcctcccgagtagctgggactataggcgtgagccaccaagcctagctaattttatcgttattattattatttgtagagcagcttctcgctttgttgcccaggctggtcttgaactcctgggctcaagtgatccttccacctcggcctctcaaagtgctgagattataggcatgagacataatcatttaaaaatttttattaaatggtcatcacagtttttagcatcttcaacaaataagaggagaaaacaaaacctcctaaaagggtcaccaaatgaacttaaaaatctatatatccaaataaaatcattttgtgaaaaggaaattatgaattagtggcacattcaacgatgtccagattctactgtcaactgaaacaatctgttcatgtacactgaagacttcttgcatcttcttggcttcatttcacaagagccaatcttccatcgttttgtcactaggagaagggtatcacatcttacctaccttccacagtatttccattttcctgaggagtcgatggcctgggctaccatggaaagtccatctgggcagcagatttataggagaaggtggtgacagcagtgttgcaattgagcaaatttcttcaattatttcagggtattccagtgactctcatgacaaactcaaggcattcacagccctctggtagagtcccaattgccagaacatttttgtcattgtttttcactaaatatgcatgatatttgagtctcatgaaactcaagatacattgtatctgttctagatgctgagtaaatgcattggatgaggactgtcaaatattacttattgtaagtctacctctgtgagtttgccttggaaatatcacctttgcactacacttaccaccccaagttttggataacgacgtccagctggtatcactaaggaaacacactacacagaaaatttaagaccggtgcaaacaggaatactatttactcaatttctgtaaggtttcctgtatgaaagtcaagacgaaggagagagccaaccacagaatgatgctgacattcctacaaatgctaagaacccagtatatagtattagaacacatctttgtacaatctaccataataattttattgttctactaatattagtaatttttaaaagtcagacttcataaacaaaagtgacatgatgtgttcatttcctaattcatcataactgatgctcactcccgaaggatctcttactatagacgccactgtgacttgaataaaatatctaaaatgttctaagcagttgtaaaagaaattgaagcgtaagtgaaatacccctgagggtgtctcttcatgagagaaagatcaaattttcttaaatatctaattgaataatttcagctttcctgtggaattacctctgatgaaatttcaagccccagctatgccctccatcagtcacacctcctgtgtcctcctgcatcagcttctccttgctttattggttttgcccatctaatctttattatttgcaaaatcagctccctttggggaaatgtttctcaccattaggtaccctaatgccttaaagcaagagtgggatgattttattttttacatgactgctcacaaagacattatgtatcttgtaatacaggtgtcctatgatgtgatttttctttaattctctagggaaaaaaatgaaggtgcgggcagacagtgccaggcataaaatattggtatcacaaatatttgttgaatgagtgaattaacaaatgaatgaataggatatcttcagaaggagctatttcgaggtcaaatcaacttaagtgataaaatctccctaaatgtctacttgattctttggtataaagaaagacaggaagcagggcatggtggcttatttctgtggtcttagctacacttgggaggctgaggaaggaggatcatttgagactagtagtttgaggctgcagtgagctatgattgcaccactgcactccagactgggcaacagagcaagactctgtctcttaaaaaaataaaataaaataagaaagaaagaggcaaaaggtacaagtctgagttagcagtgtacagaataatctggtaactgttgaagatacagcaaatatgctcttgaccggataggcccagacctcatcagtctagtccagacacagttgctgtatgatgacaggtacagataatactttttattctttattagcagagagtatcagcattggtcaagatgtggatgaggcagaaggtccaagtagatcaaagatgattccaattcaggaaatttcccaattcattgaagactgacaaaatgaatgcactcatgcatagtcaaaactacagctcaggctgggcacattggctcatgcctgtaatcccagcaggttgggaggccgagatgggtggatcacaaggtcaggagttcaagaccagtgtggccaagatgctgaaacctcgtctctactaaaaatacaaaaaaattagccaagcatggtggcaggcgcctgtagtcccagctactggggaagctgagtcaggagaatcacatgaacccaggagacagaggttgcagtgagccaagatcatgccactgcactccagcctgggtgacagagcaagactccgtctaaaaaaaaacaaaaacaaaaacaaacaaacaaaaaacttcagctaaggcaaggtgcttttgtgccaatcctaattattttggcactgaacatgctctatatggtgctaggtatagacctaggcccagacccaaaagagtgaatcttttataacataaccccgaatatttcctgctgtgatgaaatattgaaaatatcaactaatgatgccatttttggggttctatttaaaatattttctattattaaagatgtaatttcaataccaagtttaaatatatctccctgcagtagttttctgggagatcatcaggagacaatttggaagacttgggaggtcaaacaagtaatttaacaggaggctatgccactaagtgggagaaagtttgggcaggcctgaagtgctactctggctaagaaagctccatagataaggcatagattttggcccaaatgcaacttagaacttagatggaaaagtcaaagtttctggatcccatctttgagtagaaacagaatagaaagtgagtgctgacgtcaggtcttcccctttaatttataaagctctagagaagctggagtggtctctcagacaacactgatgcccatgacaaaggtatgaaagcacatcacacaggtcagcgagaaaatcactaagaccccagtatcaaaatgtggaaagagtaggaatatatcattcaccaagactagaactacaaaagtccaataaatattttaaaattacccagcttacaacccaggtaatgcaaattaacttacattgtcatgctattcttttttttttctcttttaatgtttagtttgtggctaattcttctcttgttcctgaattttaaacagtcaggcagtttgtacaatcttccttctcatgcttgagtaattcaaagagtcccaagttatttgagagatgattgggtcatgaggatggaaccttccttaatgagattagtgcttttattaatagactcgaaggaggtggttcacccttctaccatgtggggacacagcaagacagtgccgactatgaaccagaaagtgggccctccccagacatcaaatcagttggcactttaatcctggacttctcaacctccagcattgtgagaaataaacgtttgctgtttataaacaaaacaaaacaaaagggtaccaagttattaatgagaatgttcatctcaagtaatgatcaaataatcatgcaaattgtgggtgagaagaagtgtgagtggcttctttctcccctccccaactcccttttgtgactctcaccaagaaccatgaactgaggcctctgatcctcctggggctggagtgtaggagaggaaaggggaagactgacatttttattacatttttcattggaatagaactttattatatttgatggagattttgaattttattgctgagataaaaaattaaatctggtatgtaacaaaaataaatatgtgcttcacaggagctttcctttattattttaacattaaaaatttttaaaatattttagttgataaatgagaaattgcatatatttatattgtgctacgtgatgttttaatataggttatacgctttgctatgactaaatcaagctaattaacatttccgtcacttcacattcttaccactttttgtgatgagaactttgaaaatctactctcggccgggtgcagtggatcatgcctgtaatctcagcagtttgggaggctgaggtgggcagatcacttgagctcaggagctcgagaccaacctggccaatatggtgaaaccctatctctactaaaaataccaaaatttagctgcgtgttgtggcgggtgcctgtaatctcagctactcgggaggctgaggcaggagaattgcttgaacccgggaggcgggggttgcagtgagctgagatcccaccattgcactccagcctgggtgacaagagcgaaactccatctcaaaacaaaaaacaaaaaacaaaaaacaaaaaactactctcttggcaattttcaagtattaatggtaactatcatcatcccgctatacaacagtcttccagaacttagtcctctaactgaaactttgcgctctttaaccaatatctgcccccactgcccccaggccctggtaatcaccattctactttttgcttctatgagataaacttttttcagattccacacgagtgacatcacgcagtatttgtgtttcagtgcctgacttatttcacttaacataatgtcctccaggcgcatcatgttgctgcaaatacaagattttttgtatttttaaaggctgaatagtatttcattgtgtatctatcccacattttctttacccattcgcctgttgctggacacttaggttgattctgtatcttggctattgtgaataatgttgtaatgaacgtggaagttcaggtatcacttccaaatactgattttattttctttgggtagatccccagaattggaattgctggatcctatggtagttctaggttcattatttgaggaacttctgtacagttttccataatggccgtactaatttacattcccaccagcaacagtgtatcagggttctcttttctccacattctccccaacgcttgttacctttcatcttttcaatcaaagccattcttacaagtgtgaggcaatatctcactgtggttctgatttgcatttccctgatgattagtgacggggaccaccttttcacatacctgttggccatttgtaggtcttcttttgaaaaatgtctatttaggtttcttgctcattatttaattggcttattcgtcttcctgcttcattgataccaccagggtgatctagcttgccactctctagacttggcaaaagtttaaagctccttatgatttttacggtacctttagcctctctctatgatgctgtttgcccctccagtctgccatgtaggacaggactgtctcacacagggtttagatgatgcctaagagaaacattcacacattttattttttgccttaatagaaggctgcagaacagagccacctccctttcaactcttccacccatagctagacagcctgcctcttgcccttcagaatcccatggcctacaagtctgtggcctattgtgttcccaggggtgcgtgactctcatctagcactctcagcagccccttgaagtctcttatcaggagtgagataaggcgcggtcacccctggctccatccactcagggctggtggaagcaatggctcccaacatcctatggattccagactcggtcttcaagacaatgccttgcccttagacccttgatgtgagcagaaagcaattactgggatcatgcatatgttagtggaacacagcccctttacacctgatcttgacccacttaacactttggctgggtttccatgttaacatcctgttacagaaaccattttccactcagcaaaacagcagagagtttaaaggggaataatccattctggcaaaagaagagtgaaagagagctgctggtgggcaaataaacaggggaaagtctccttggaaaggacgtgagagtgagtaataaagccttaaaacattcatggccataggctgggtgtagtggctcacacctgtaatcctagcattttgggagctgaggcaggcagattgcttgagctcaggagtttaagaccagcctggataacatggtgaaacccaatctctactaaaatacaaaaaattagctgggcttggtggtgcacacctgtaatcccagctccttgggaggctgaagcaggagaattgcttaaacccaggaggcagaggttgcagtgagccgagatcaggccactgcactccagcctgggcaacagttgaatgagactttgtttccaaaaaacccccaaaaaattcatggccataattctaggacttgcttttctaggactattacccaagggaataacaggaaagctagagggctaagaatacactatattaaatatggaaacacaaaggaaattgcaagaaaatcatgaatatctgttcaacaagatactagatcatcattcaaaatgatgtgtacaaattgttctacctaaaaagctgaaataacttgatttgtaaaacccttaattcctcctcattgtaaaagtccagaaaaatatataaagtaaaaaatatacagtaaatatatatgtctaaagtatttatatatttatatatgtaaagtatttatataaatatataaagtaaaatatatacagaaaaaatatataaagtaaaaaatcattataataccatttctgtcattatttggtatatagtttgattttcttttatatatacatctgctaatacacatatgaatatctgtttatatacaaaatctatatgcatatatttattttaagtgtgctcaaaactgtaccacacatgctgtattataaactttcttctttaatagtctgttgtggctaacttttcatatcaataagtgctggtctataatattttttaaaaaattatttcatggtaatccagtgctgagatgtaatgtaatttattttaatgagttcttattattggacatttgggtgatagctattattttgctattatatgctaacagttgtgtgaacatacacgcatgtatatatatgtgtctttatgtatgcatctttatttgtttttgaaattgccagtttcctgaaagggttattgctgagtcagggcccatgcacctttcaagacctgtgatctttataaccaaatttcagaaagtttagacatgagcatatatcagatgcttttcaactctggagagtctattttcagcaaagccatcagagttattctgttaagacataagtcagatagtcagtgtactcaaaaccctcccttttatctactacttcccatctcatctctctctaggaaaagccacagtccttactgccccattaagtgaccctctggatttatctcccattcaccttccaccctgcctgagcctcacaccagatgtcccctatgtcttctctcctttccgtctctggagagccctaccccagagctgaactgaattctctccagaatatcttcccccttctccaccaagcccctttcccagtttttctccacacaacttttcatgtcctaatgtacaacttatgcattcatttatgtagttaacttcttagtttttctccccctattcttcttccctccaccgacccaccagaatgtcacctccaccaggacagaggtttgcctattctgttcaccaatcaatccgcatggctagaagagtacctggcacatagtagatgctcaaaacatagttggggagtgaaaacatttgcctagtgttcattcgaggttttgtgttttcttttctttcttttcttttttctttcttttttttttttttttgctttgatgaattaactaattaactataatttgctgatttttctattgggtatttaacatttttaaattagacttaaggcccattaatacattagagataaaaactaatgttaggtatatatgaggaaatatgttttttccccaggttttgggggaaaagtttactaaacaatgcagaaaatattcagcatacttaagagaatactgatttggtgtatacacacacacacacagaggatcaacagtacatggtctgcaatctgctttttttcacttaaaataacattactgagatttacccaggctgttttcaatagatgtagcttatttcccttaactgctgtagtctatcctatgaatgtagctcacattgattagtcatatccctattactaaatacacaagttttttttctttttattttttcctttttctattacaaagaacaatccagtgaaagtttctctaagcatatattcctagaaatggtatcaaagggttgtggcgataggcacagtttgaattttatgacactgccaaaattgtcccataatacttgtccagtaatgtacaaatattcctaccttcattccagacttgaatttttgccaatccggcttgagagaggtgcattaaagtctaaccctttcagtagatttctgtgtctgttttcttgtatctccaacagttttcatatcacagattttaatttcaaaaatgtctacgaatcgattgtccccttcactaatgtggctcaatttaatactttttaccttggattattttttacttgaccaatattgcaagttcaaattttattttctacatgtatttgcctggtatatctttgcctcaccatttattttaaacgagtcagtgtgtcttacttctctttcctctggaaagatatttgtagattttatttaggatctaatctaaagatacttgttctttttacagatgaatttaaaaatccccattcatttttgaaagctgtttgtattccttttctcaagtcttcatcactctccctctctctgatggtatttcttttgttttctaccttttgttagatggagtgagttttctttcattcctacgtttataactggaaagtgacaaaacttgttaccactccgttagtggccatgctcatatctttgtacaaatgcttaaatatgtatttcttgaattttaatctcagaaactgaacactgcttattattgcttccctccataaatgatggagaaattagcatatcttcactccctccagtctttccaacttttttaattactagaatttatcataaactctgtcatagttttaaaaaataattatagcattcacattccattcagaaaatatttttatcacaattatttagattctgcagggcatgcagagaaagctggtgtcttggaaaattaaggctgaaaattttgtcttggaacagtggtttttttaaaaagtctatatttgctgaaattattttatcaaatctcagatgctccaaaattgggcacttcctatcttattttattattctatttgagacagggcctccctctgtcacccagactggagtgcagtggtacaaccattgttcaccatagccttgacctcctgggcttaagtaatcctcctgcctcagcctcctgaatagctgagactcacaggcacatgccaccatgcctggctaattttaaattttttgtagagatggggtctccccatattgcccaggttgatcttgaagtcccgggctccagcagttctcccgctctggcctcccacagtgctgggattcaggcgtgggccatcgctcctggccctgtgttaagttactcttatttctggtctttggagtttgcttgctcatttataagtgaggctgctacactggtgaagttcaaatagagactaatgctattaatcttgggtttcccatcacggctgttgaccagccactgcagcaatccttcaaggccactgcattgctctcctcccagtgtctcccctctaccctcgagcttgctccccagtgtctgagagagcctgtgctgctctataaactgaggtcacggacaaagctttctcctctggtgccacgctcatgcctaagaaaccttgctccaagatggggaaagcctttctgccctcccaggacccacttatttccagccctcatgcatcaatatggggaattcctactggggttggtcagaattccatccaatgctaatttctcgagaaagtctgacaccaccatgtcccttccatttggctaaattttattgattccagaaaaatgttaatttttcaaatgagtagtgtgtggtaccattctaatttccactctgtgctaataattccttttcctctggttttgctttctttttattctttgcaggaagagggagggaaaaattttggtaaacttctggaaagtatggtgtattagccaattgttacttgtaacatcaaccccaagactcaaatatattttgtaattatatttatgctgaatacacatatatttagaaccacagtgatttttggatttaaaaaaacacatactgcaattattcttattttcatgctaaagaaaaagataattatgttctttaaaaacagcattttcatggaatatgatgcagccataaaaaaggatgagttcatgtcctttgtagggacatggatgaagctggaaatcatcattctgagcaaactatcgcaaggtcagaaaaccaaacacagcatgttctcactcataggtgggaattgaacaatgagaacacttggacacagggaggggaacatcacacacggggggcctgtcgtggggtggggggctaggggaaggatagtattaggagaaatacctaatgtaaatgacgagttaatgggtgcagcaaaccaacatggcacatgtatacatatgaaacaaacctgcacgttgtgcacatgtaccctagaacttaaagtataataataaaaaaaagcagggttttcaaaataattcttcaaataaaggtattttaaatttactgttagtagagtactttaaaatctagcattaatttaaagatttagacattagcaatgcacttataagaatgaaaagttaaagaataatttggagaattttatttttaaaatttatgactcaacagcaactgaaacatttattaagtgcaagggaaattgaatcttaataaaaacaactagcaataatattataaaatttgtttttaattatttaattttctgatacatagtaataaagactgtgttgtcataaagtaagagtaagagttaactactatatgggatcatataccttgataaaagaagatttactaggataagaaaggtgtactatgaacgttgaatactggactataaaaatctttttttttttttgagagagagtcttgctctgtcacccaggctggagtgtcatagtggcatctcagctcactgttatctccacctccctggttcaagctattctccagcctcagcctcccgagtagctggaattacaggcatgcatagccaggcccagctaacttttgtgtttttagtagagatagggtttcaccatgttggccaggccggtcttgaacccctgagcacaagtgatccacccgccttggcctcccaaactgctgggattacaagcatgagccaccgtgcccggcctgtgcaaatctttaaataccctcctgggaggtggtgtccttaaggagaaagaattcctttaggacagttctggaataatggccaggaactattaataggaaaagaattagacctgtgaatttctgtttctcccaaaggaaagggaaatgtcattgaacgattctaccatgagcctacttacaattctgctctatcataaggcggttacatgtattatccagagccttaaattaacaatccaaggaagaagctactgtcctgtttatttaattgatggtaatgatgaaacccagagagctcaagtcctctctcggggccacatagtatgtcggcaagtcgggggttcttgggtctcagtgatcacaaaacagatacgacacacaaaacgtgaaggcagtggcaatgaaggagacaattccactctggctctcagtgctgaaaagggagaaatatgcttctgttctttgaagtgtccatttttcttggggtccattttttttcatttctgagaatatggcttctcctttaagaactgttattgtcattctaaaggtttactgattgaattcagctccctctgcattcatccctaaactacattacagattgtatgttacccttactctcactgcggaaattgctgatgaaacaaaatagagccatttaatttaccctttcgttttaaatataacaatgtcaccggtgtctgatgttccccttcctgtgtccatgtgctctcattgttcaattcccacctatgagtgagaacatgtggtgtttggttttttgtccttgcaacagtttgctgagaatgatggtttccagtttcatccatgtccctacaaaggacatgaactcatcattttttatggctgcatagtattccatggtgtgtatgtgccacattttcttaatccagtctatcgttgttggacatttgggttggttccaagtctttgctgttgtggggtggggggatgggggagggatagcattaggagataaacctactgctaaatgacgagttaatgggtgcagcacaccaacatggcacatgtatacatatgtaacaaacctgtacgttgtgcacatgtaccctaaaacttaaagtataataataataaaaattttttaaaaaaacaaaaaacaatgtcactataacaaatctgaaaggtgtggctgcttttctcacgttcatgcgttttggcaacttgtagttccttaaggtgtgacggatactctcttcttcccaaatgtactttcttcatctcctttaaacctcacattaaatcctcattatttgctgattccctgcctggaaattgcctacttactaaaatttgtttgtagccctcaaatcaataactcatggagctttcacggttattcatggccattcacagagtggcaaattctcaagtcacctaacagtcacatgaccagctgatgtcaaccaagacaatgctcggcctcctgttccagctctcatactgtaaacaaacatcctttttgtgggacatgtggtgccacattttttgcatttatgcttttggttgacaatcttgctatttaaaatggcccctgggcatggtggctcatgcctataatcccagcactttgggaggctgaggcgggtggatcacctgaggtcaggagttcaagaccagcctggccaacatggtgaaaccccgtctctactaaaaatacaaaaattagccaggcgtggtggcacacgtctataatcccagctactcgggaggctgaggcaggagaatcgctcgaacctgggaggcagaggttgtagtgagctgagatcacgccattgcactccagcctgggcgacaagagcaaaaactccatctcaaaaaaaaaaaaaaaaaaaaaaaaaaaggccccaagagtagtattgaagtgctgtctagtgtttctcaatcagggaaggctgtggcgtgccttacggaaaaattaacgtgttagataagcttcattcaggcatgagttatagtgctgttgcctgtgagctcagtatgaattaaaaatatacattaaataagatgtctttaaacagaaacacatatgcatgaagattgtgggttgatccattgacaaaaaaatgtgaccaggggcttgcaggaaacttatcctgtatttcccccaggatcaatgattcagtatcccctaattcagcgttcaaggtaactttataaaacattgctactctggataagaagaatcacacatgtgtttgtgtcttattccctctgctggagaacactgatgaatgtttttgtatactgcagggctacagtaaccaaaacagcatggtattggtacaaaaacaggcacatagagcaatggaacagaatagagagcccagaaatgagggaacattcctgcaaccatttgatcttccacaaagctgacaaaaacaagcaatggggaaaagattccctattcaataaatggtgcgggataactggctagccatatgcagaagattgaagctagatcccttctttacaccatatacaaaattcaacttaagatggattaaatacttaaatgtcaaacccaaaactataaactctggaagatgacctaggcaataccatcctggacacaggaacgggcaaagattttatgacaaagacaccaaaagcaactgcaacaaaagcgaaaattgacaaatagtatctaattaaacttaagagcttctgcacagcagaagaaattaccaacagagtaaagagacaacctatagaataggagaaaatatttgcaaactatgcatctgacaaaggtctactatccagcatctataaggaacttaaatttacaagagcaaaacaaacaactgcattaaaagtgggcaaaggacatgaacagacacttttccaaacaagacatgtatgtggccaacaatcacatgataaaaaggttcaatgtcactgatcattagagaaatgcaaatcaaaaccacaatgacataccatctcacaccattcagaatggctattactaaaaagtcaaaaaacaacagatgctggcgaggttgcagagaaaagagaacacttgcacactcttggtgggagtgtaaattgttcaaccattgtggaaagcagtatggcaacttctcaaagagctaaaaacagaactaccattggacccagcaatcccattactgggactatactgagaggaacagaaatcattctcccataaagacacatgccaatgttcactgtagcactattcacaatagcaaagacatggaatcagcctaaatacacatcaaggacagattggataaagaaaatgtggtgcagctacatcatgggatacgatgcagccatgagaaagaatgagatcatgtcttttgagggaacatggatggagctggaggccattatccttagtaaactcatgcaggaacagaaaaccaaatgccacatgttctcacttataagtgggagctaaatgatgagaactcatggacacgaagaggggagcaacagacactgggatctacttgagagtggagggtgggaggaggaagaggagcagaaaaacattaagtattgggtaccaggcttaatacctgggtaatgaaataatctgtacaccaaacccctgtgacacgagtttatctgtataacaaacctgcgcacatactcccaaacctaagataaaagttttaaaacaggacgttttctgtaacaataacacatacaaaactctcatattctatacctcctaacttcattctttcataggtaacattatttgctcttttgcttatcgtattatttttaaaccaatgcaatatctattttaaaaaatgtaataaagtaagaaataccatactttaactgttatgataattataattctgagccactgttccaagcaaaatggttaaaatatttccatgtaaatgttcatgtaatactttcatgtaaatctcccataatactaggtcaagggttcttaatttctctgtctcttatttaaacatatcaaccaaagtgacaggttctgagagtttgcacctttttaaagtaccacaataatccatccagtggaacatgacacccaatggataagcccagaggagccgtgtgactttcaaaggaaagttctgtcattcaaatctgtgctcattgaatctggactaaaagaatcatggttgaattattcgttgaatattttggtaaatgagacactaaaataactgtatccaaccctgtggcatcttgcttaataaaataactgtctataaaaatgtaaaccccaaatgatcttcaaacacatatttcattgaatatctgaacctgtttccacttgattccttcccattcccactcctcaccgctctctccctttctctttctttttcttctttctcaaataaaaagagagagacataagcagagtgttaaaaataaaggatgatctaaccaatacgagactgagagtcccaaactgctgctaaattactcaggacattagagtcagactatgcctagaatagaaaaagggcaattttcaatctttttctccccaaaaggcccagcaacatggggaagaaaatagtgatcatttgcttaattgtctgatcctctgatcactaatatggaaagacacattcacagatattctagaacatgccatgtggtataatagaaggaacaatggcccatgagtttgaagaccttgggttctggccttcctgttaactatgatattggatgagtctctagaccatcctgatttgctcacctgtgtaatgagaataaagatacttggtgtgtctattccataggactgaggtaagaattcttggagatgatgtgttggagagttctgtgttaactacagacggaaagtaatgtatggaattactagatatattgtactttcaggtcactgcataagtttctactcaaaagaaaattatagcaagttcttttataaatgaaatatccttttgaagatcattttgagtatataggttttttttttttttttttttgagatggagtcttgctcttttgcccaggccggagtgcagtggcgcgatcttggctcactgcaagctctgcctcctgggttcacgccattctcctgcctcagcctcccgagtagctgggactgcaggcccctgccaccacgcccggctcattttttgtatttttagtagagatggggtttcaccgtgttagccaggatggtctcaatctcctgacttcgtgatctgcccgcctcggcctcccaaagtcctgggattacaggcgtgagagtatatagttttatatagagttcttttttaagtgagataccacagggttggacctagagttatcttagtgtctcatttgacaagtgtctcttccttgtagaactgcaatgaatttgcactgccaagatttgtaaacaatatcgattaattacatgtgtctgttgcatcttgaatatactgccaatgatttttaaatatttttttaaattatctcaaaatatatttcaatttaaaacatgtaactagttttattaagtgtttaatggatacctcagtgtcattaaactatatttttaattttctatttaattattaattctttctgttccctcattccttttatttgtgttatcacttatcttgctacccaaacgttgcatacaattaatcagctgatcactattttctatcagtagcttccccatgttgctgggccacttggggatacaaaagattgaaaactactctttttctattcacatatttattcaacaaacatgcactgggtgcctactatattggtgatgggattgggagtatagacaaagcttctatcctcaatgaggttacattatagagaaatactaagcaaaaaatgtcttggacagggcagaaaagacagcactgcagttgcacccgcacaggtgatgtccctcaagaacgcagttcctggagctgggaccacgttaattcttctgtctacctgcagagggcgccattgcaccaggtacgctttcagtctcacctggtaaaactagaagatggcagctttacaaagaatttcaagaatcctaaaacagtaaaggggtcttatgtgggctaattgcatgaggtgctgaacttaagtatcttcagttgctggagaaaagcagaaattctgcgtttaaggggagaaaatggaggaaaagtgagacaggtgtgtgtggatactggatgtattcatttgtttcaccttgtgcccggcttttcctaaggcctggagacccggcgatgaacgcagttggctatcattgctctcagagggcttactttgtactggtctgtggtgtgacaatgtagaataatgtgaataaagtaataacaatgtccaaaatttattgaatgctttccatgagccaagaactattcaagaatttcacatacattatcttgtttaaactgcacagccgcgcgttgagaagaggtgctatcaactttcccattttgctgatgaggcaatttaggctggatgagaggacgagactgagtactactttcttggtggaggcgacagtcaaagccaggcattagaccggaatcgactcagttaaccactaggctgtgtgtgacagctggaggttagggaacgcggaggcagagagagggaagcagcgggtgcaaagggcagagctacttcggattttatgacggtcaaaggcctcaatgaagaaagaggtaacatttgtttttgttttgtttttgagacggagtcccactctattgcccaggctgtagtgcagtggtgcgatcgcggctcactgcaacctccacctcccgggttcaagcgattctccttgcctcagcgtcccaagcagctgggactacaggcgcccgccaccacgcccgggtaatttttgtatttttggtagagatggggtttcaccacgtcggccaggctggtcttgaactcctgacctcaggtgatctgcccgccttggcctcccaaagtgctgggattacagacgtgagccactgcacctggcgagaggtaacttttgaattgaaatctaaattgtaagagggaatcaactccaggaatatctagaggcagagagcaccatcggtacagcaagggggactgccctgagcagaaaataagcagggaacgtttcagaaaaagtccaggaatgggacaccagcagcagggtggctagagctggagggaagggagaggttatgtcagggctgagccgggagcctacggagccctggctaggggctcaggttcgctatcgcaatggaaactcctgggagctgtgagagcagtgatatgatgggatttacacgtaattatttctccgcttctaggaggcgactggatggtaaaagcaagagcaggtagcagacttttaaataacaataataatcgtggtaatgatacaataggaaaacaacacagcattggtgttatcttgatcggtgaaatacattagttttttgttgttgttccaaatcagcccacttggttctgttacttatctaactagagatcagtctgatatgacgcatggtgattttgaaataccagcacagaacatccctgagatgacggtgatctgaaaagagccctggccctgttcttgtagtgtcccctcctccatcgcatgcgcacactagaggctgatggtggttcgcggatgctaccaagaaggtacaaaaagctgattttacagggatttgtctgacccgtgtacaattatctctcagagtttccaccttttgtttcttcactcctcctatttgccaaaacagtcactggtttgcagagacttccctccccacactctgccctcccgtactcagtcctgcaaaacggagcttgtgtcaaatgaaacaatctccgtttcctggtggacatacttccttgatctctggggcttctgcccttcttttttttttgagacggagtctcgctctgtcaccaggctggagggcagtggcgcaatctcggctcactgcaacctctgccttctgggttcaagtgattctcctgcctcagcctcctgagtagctgggcctacaggcgtgcgccaccacacccagctaatttttgtgtttttagtagagatggggtttcactatgttggcccaaatggtctcgatctcttgaccttgtgatccgcccaccttggcctcctaaagtgctgggattacaggggtgagccaccatacccagccttgcctcctttttagaagaagattatgataatactaacaatagcttgaagataataatgagaataatgaaaataagtattgcttaaagttaaaaataatgaaaataaataatgcttgaagagaatgataatgaaaatagtaacagcaacaataataataatagttaacatttcactagcatttgccatgtgccaggcactgtgattgtgctttatagattaattatttctccaaacaaccctgtgcagtgggtgtattattgttacttctatttttcagaaaaggaaactgaggcacagagagtttacaggatttgttcttgttgcacagctaataaatggctgcattggaatttgaacccagttgtctgggaagagccattctaatttggagaaatatttagtacaatctctgatcaaggacaaatcctaaaatgtagcttggagagcagtttaatatccaatggcaagaaccgccattcattttgcaccaacctaatgcatactcctgctgaaaaaaagaggcctacgatattcttgagagtgcaaggaaaggatagtgacatcacctgatcaatgcagaaagaaaggattatagtgagacaaaactttgcaagactcttaagaaacagtggctttaacttcatcaaatttgctacctgctcttagttgagtaacaagtaagtcatctgtcctctctgagccagattcctgaaaaacaggtaatttaattatttttttccagcatcactgggggggtggttatgaaaattgaaggaaattatcaatgtaaaagctttctgaaagcttgtaacatattatgcaaatgtaagattaactatatctgcaatgcaactgattatcagttctttagtgaagtgtaatgataattctaagtgttacttcagattcaaatgaacatataattttagaaataaactagaatttggcctcacgaccttggccataactttcttttttataataaccaaccatatatttatattcagaatctctctataatgcatctatttcttcaagctatatttaaaatatattaagtaagaaattaaaatgaagtcatttttttcaaacgtacaatgtaattttatattaaattttaaagctaaatgcattcattcagtgattaatttgtttaatgtgccaggcaatattccaggcactaagatagagatatataattcagaccaacattcttagtctcctaattccttgtgttaaatggaggaaacaaataagtaggtaaacaataattaattttaatattttgctatacatttcacaggtaagtggataacccccatgactttgcaattcaaatttagtgtgtcagacacttccatatatgttatctcctgtgaagttcagggtagctgtgtgagttaaaagaaccacacatttaatttgttgctttcttattagatggctcagaatggaaaagggttggcgaaagttttcagagctagaagtgacagagccagggctggaatagaggctttagggcaagaagttctgagaagaccccagagactctgagaggacgggaggatcttatcatcactgagcaagatactgccccaggggtggtagtttatggtttttattcctcacactgcttccttatttagtgagcatgtaagttaattaaatcagagtatgtataatgcatcatataactctatgctaatggttcccttagtatatcttatgtttctcttatgtactttgcttgcattctcttctgaggcccctagtaatgacgtgtccttttagaatatgaaattaaaaccaagtattctaaattgctttcatcatctggaaattttgatgtatttttgacatcttacaattatgtcccttaaaatttctctagaggttctagaacaagggctatttttttgtatgctcacttgactgcaatttcaagctatggaaataagtgatcaatattctcccaagccaaaagccccgtaggacaaccataaagctcctcagtgaaattcagaaatggtcatctaaaacgttgcttttcacagccctacatttttctttcttactgctgttaagttgagcctaaagctgtcttcttacatattttaagttgggcctaggggtttctccatacataataaactggaacctaactgtatgtgtaaacaacctactcttgtaccaatcactgagttttggtcaacaaaaggcagctcactgttgaaactgtgtcaaataaggaaaatgtcaagctgaaccaatctggctgtttcttttcctcacttctattttccatgagccgtgttctgttttctgtccataaatctttttcaaccacagtctctctgaacctattctgatttggggctgcctgatttggaaatcattctttgctcaattaaactctgttgaactatttctctaagatttttcttttaactatcaatctgagtatagatacttagtgtctttagagctaaatgtgttgcaactagatcacataataaatttcaagaatcaagaacacttatttattcattcactcaatacatctttttgaatatctagttaagtgataaatactgtcctaggaactaggaacgctaagataaataagatgtagttcttgaactcccaagaggatcaatccagtgaaatagacagctgactgacccagtcctcatgaccaccatctactgtggggccagtgaaaatcgaagaaggctttcctaaactggcaatacggttgttgagtcttaaaggacctagagtgttaacatagccataaactttctacgtgactcagtttttctttgattaacttatccattgcattattaagataaatccattaataatgaatagttgcagtaaagacatctttaagaaaacgattttgcttttaagtaaagcagcaggtgagtttttatatgtaagagctcgtcaggagttaattttctttctcttccctgattcatttagcttatgttaaaccaggcatatttctcccatagtatttaaaaacaaatatttaaccacatttctctgaaaattatttaggaataggtcttaatatccttctatttgaaatgagagccttcccttattagaaaaatcttcatgatgcttagaaagactgcattaaaaaaaaacaaaactccaaaacttgagaatatatagtcctttaaatctgcagttccactgaacaacctaaaaagttctgtgaatacccacagaggaaaaggaaacccagttctattttgcaacttccattgcaatttcttccttgaaatttttaattattttgagtgagattaaaagttactaagcatatgagattgaagagtttttcataactgatatattattgttatgtgtcattttaattccactttgacttgaacttcaaaattaatcattgtaaaacaatcagtgcttatttgggcattgatcaatttcttttatccaaactgcttctcgaatctcattccttttttcttggtttaatttcctgcttatagaaggctatttttagtagatctcttagtgatggtctgtgaatggaaaactctttcaatattggttgtcaaatttaaataatatcatatctggctatacaaatataggttacctgatattttctctcagtgccttgaaactattcttcatttctgaccttcatgagtgcttatacaattttggagataggctacgtatttattcttttgctgctttaaaatcctcctttataaaagtaaagtctctttttccttgagtttcttcaagtttggggaggtgcatctattggcagactttacattttcaccaactgtaactagcgctcagtgtctttcaaaatttgaggatttatgtccttgttcagttctaaaaactacctcaactatgatttcagtaaatactgcttgtttcttgtgctctcctactgaaacccctctcatgtgttctcttctgggtctaacatcctttactctatgtgttttaacctctcttccatattttccatctccttatgcaactgtgcagcattctagatctttcttccaatttacttgtgcactgaggttttaattataacgaccatatttatttgtataatatttgtattattacaaagcctctttggttgtttatcaaatcttcctggaatttttcctgatttttttttctaatattatctagctctcatatcattttttgcgggtaattttatataattttaatggtctaaaaatattatttagattattctaatataaatttcttgtcaatctgtttacttttctttatgatacagtgttttcttgggtggtttctcattttcgttgctagctcaccttcagaagaataggttttcttatgggaattccatgtgcaatggactaggaaacaatattctatagcaattttagctttactttttccaggtgatatagtttggatatttgtccccacccaaatttcatgttgaattgtaatccccaatgccagtgatggggcctggtgggaggtgtttggaccatgaggatggaacagtccgtcatggcttggggctgtcccatgatagtgagttctcgtgagatctggtcatctaaaagtgtgtggcccttccccctcactctctccctcttgctcctgcactatgtgacatgcttgttctcttttcaccttccaccatgattgaaagctccctgaggcttcaccagaagccaagaagatgccagcacgatgcttcctgaacagcctgcagaaccatgagccaattaaacctcttttttctttctttttctttctttctttctttcttttttctttctttttagttatactttaagttctagggtacaggtgcacaatgtgcaggtttgttacatacatatacatgtgccatgttggtgtgctgcacccattaacgtgtcatttacattaggtatatctcctaatgctatccctcccccctcctccaccccatgacaggccccggtgtgtgatgttccccatcctgtgtccatgtgttctcattgttcaattcccacctatgagtgagaacatgcggtgcttggttttctgtccttgccatagtttgctcagaatgatggttaccagcttcatccatgtccctacaaaggacatgaactcatccttttttatggctgcatagtattccatggtgtatatgtgccacattttcttaatccagtctatcattgatggacatttggcttggttccaagtctttgctattgtgaatagtgccgcaataaacgtacatgtgcatgtgtctttatagcagcatgatttataatcctttaggtatatacccagtaatgggattgctgggtcaaatggtatttctagttctagatccttgaggaatcactgcgctgtcttccacaatggttgacctagtttacagtcccaccaacagtgtaaaagtgtttctatttctccacatcctctccagcaactgttgtttcctgacttcttaatgatcgccattctaactggtatgagatggtatgtcattatggttttgatttgcatttctctgatggccagtgatgatgagattttttcatgtgtcttttggctgcataaatgtcttcttttgagaagtgtctgttcatatcctttgcccactttttgatggggttgattttttcttgtaagtttgtttaagttcttcatagattctggatattagccctttgtcagatgggtagattgtaaacattttctcccattctgtaggttgcctgttcactctgatggtagtttcttttgctgtgcagaagctctttagtttaattagatcccatttgtcaattttgtcttttgttgccattgcttttggtgttttagacatgaagtcctcgcccacgcctatgtcctgaatggtattgcccaggattacttttagggtttgtatggttttaggtctaacatttaagtctttaatccatcttgaaataatttttgtataaggtgtaaggaagggatccagtttcagctttctacctatggctagccagttttcccagcaccatttattaaatagggaatcctttccccatttcttgtttttgtcaggtttgtcaaagatcagatggttgtagatgtgtggtattatttctgagggctccgttctgttccactggtctatatctctgttttggtaccagtaccatgcggtttggttactgcagccttgtagtatagtttgaagtcaggttagcgtgatgcctccagctttgttcttttggcttaggattgttttggcaatgtgggctcttttttggttccatatgaactttaaagtagttttttccagttctgtgaagaaagtcattggcagcttgatggggatagcattgcatctataaattaccttgggcactatggccattttcatgatattgattcttcctatccatgagcatggaatgttattccatttgtttgtgtcttcttttatttcgttgagcagtggtttgtagttctccttgaagaggtccttcacatcccttgtaagttggactcctaggtattttattctctttgaagcaattgtgaatgggagttcactcatgatttggctgtttgtctgttattggtgtacaggaatgcttgtgatttttgtacattgattttatatcctgagactttgctcaatttgcttatcagcttaaggagattttgtgctgagatgatggggttttctaaataatacaatcatgtcatctgcaaatagggacaatttgacttcctcttttcctaattgaatatcctttatttctttctcctgcctgagtgccctagccagaacttccaacactatgttgaataggaatggtgagagagggcatccctgtcttgtgccagttttcaaagggaatgcttccagtttttgcccattcagtatgatattggctgtgggtctgtcataaatagctcttattattttgagatacatcccatcaatacctagtttattgagaatttttagcatgaagtgccgctgaattttgtcaaaggccttttctgcatctattgagataatcatgtggtttttgtctttgtttctgtttatatgatggattacttttattgatttgcttatgttgaaccagccttgcatcccagggataaagccaacttgaccatggtggataagctttttgatgtgctgctggattcggtttgcccgtattttattgaggatttttgcatcaatgttcatcagggatattggtctaaaattctctttttttgttgagtttctgccaggctttggtatcaggatgacgctggcctcataaaatgagttagggaggattccttctttttctattgattggaatagtttcacaaggaatggtaccagctcctctttttacctgtggtagaatttggctgtgaatccgtctggtaccggacgtttttcggttggtaggctattaattattgcctcaatttcaaagcctgttattggtctattcagggattccacttcttcctggtttagccttgggagtgtgtatgtgtccagaaatttatccatttcttctagattttctagtttatttgcgtagaggtgtttatagtattctctgatggtagtttgtatttctgtgggattggtggtgatataccctttatcattttttattgcatctatttgattcttctctctcttcttcttgattagtcttgctagtggtctgtcaattttgttgatcttttcaaaaaaccagctcctggattcattgattttttgaagggttttttgtgtctctatttccttcagttctgctcggatcttagttatttcttgccttctgcaagcttttgaatgtgtttgctcttgcttctctagttcttttaattgtgatgttacggtgtcaattttacatctttcctgctttctcttgtggtcatttagtggtataaatttccctctacacactgctttaaatgtgtcccagagattctggtatgttgtgtctttgttctcattggtttcaaagaacatctttatttctgccttcattttgttatgtacccagtagtcattcaggagcaggttgttcagtttccatgtagttgagcgcttttgagtgagtttcttaatcctgacttctagtttgattgcactgtggtctgagagacagtttgttataatttctgttcttttacatttgctgaggagtgctttacttccaactatgtggtcaattttggaataagtgtgatgtggtcctgagaagaatgtatattctgttgatttggggtggagaattccgtagatgtctattaggtctgcttggtgcagagctgagttcaattcctggatatccttgttaactttctgtctcgttgatctgtctaatgttgacagtgggatgttaaaatctcccattattactgtgtgggagtctaagtctctttgtaggtctctaaggacttgctttatgaatctgggtgctcctgtattgggtgcatatatatttaggatagttagctcttcttattgaattgatccctttaccattatgtaatggccttctttgtctcttctgatctttgttagtttaaaatctgttttaccagagactaggattgcaatccttgcttttttttgttttccatttgcttggtagatcttcctccatccctttattttgagcctatgtgttgtctctgtacatgagacgggtctcctgaatacagcacactgatgggtcttgactctttatccaatttgccagcctgtgtcttttaattgaagcatttagcccatttacatttaaggttaatattgttatgtgtgaatttgatcctgtcattatgatgttcgatggttattttgctcattagttgatgtggtttcttcctagcatcgatggtctttacaatttggcatgttttagcaatggctggtaccagttgttcctttccatgtttagtgcttccttcaggagctcttataaggcaggcctggtggtgacaaaatctctcagcaattgcttgtccgtaaaggattttatttctccttcacttaggaagcttagtttggctgcatatgaaattctgggttgaaaattcttttctttaagaatgttgaatgttggcccctactctcttctggcttgtagagtttctgctgagagatcagctgttagtctgatgggcttccctttgtgggtaacctgacctttctctctggctgcccttaacatttttttccttcatttcaactttggtgaatctgacaattatgtgtcttagagttgctcttctcgaggtgtatctttgtggcgttctctgtatttcctgaatttgaatgttggcctgccttgctaggtaggtgaagttctcctggaaaatatcctgaagagtgttttccaacttggttccattctccctgtcaatttcagatacaccaatcagatgaagatttggtcttttcacatagttccatatttcttgaggctttgttcatttctttatactcttttttctctaaacttctcttctcgctccatttcattcatttgatcttcaatcactgataccctttcttccacttgatcgaatcggctattgaagcttgtgtatgtgtcacgtagttctcatgccacggttttcagctacatcaggtcatttaaggtcttctctacgctgtttattctagttagccattcgtctaatcttttttcaaggtttttagcttctttgaaatgggtttgaacatcctcctttagctcagagaagtttgttattaccgatcgtctgaagccttcttctcccaactcctcaaagtcattctccatccagctttgttccgttgctggcgaggagctgcattcctttggaggagaagaggcactctgatttttagaattttcagcttttctgctctggttactccccatctttgtggttttatctacctttggtctttgatgatggtgacgtacagatggggttttggtgtggatgtcctttctgtttgttagttttccctctaacggtcaggaccctcagctgcaggtttgttggagtttgctggaggtccactccagaccctgtttgcctgggtatcaccagctgaggctacacaacaacaaatatttcagaacagcaaatgttgctgtctgatccttcctctggaagcttcatctcagaggggcacccagtcatatgaggtgtcagttgacccctactgggatgtgcctcccagttaggctactcgggggtcagggacccacttgaggaggcggtctgtccattctcagatctccaactctgtgctgggagaagcactactctcttcaaagctgtcagacaggggcgtttaagtctgcagaagtttctgctgccttttgttcagctatgccctgccaccagaggtggagtctacagaggcaggcaggccttcttgagctgcggtgggctccacccagttcgagcttcctggccgatttgtttacctactcaagcctcagcagtggcagacacccctcccccagcctcgctgctgccttgcagttcgatctcagactgctgtgctagcagtgagcgaggctccgtgggtgtgggaccctccgagccaggcatgggatataatctcctggtgtgccgtttgctaagaccattggaaaagtgcagtattagggtgggagtgtcccgattttccaggtactgtctatcacagcttcccttggctaggaaagggaattccccgaccccttgtgcttcccaggtgaggcgatgccccaccctgcttcagctcatggtccgtgggctgctcccactgtctgacaagccccagtgagatgaacctggtacctcagttggaaatgcagaaatcacccgtcttctgcgtcgctcatgctgggagctgtagactggagctgttcctattcagccatcttggaacaagaaccaaaactcttttctttataaattacccagtctcaggtatttacagcaatgcaagaataacctaccacaccacgtattccaagggctcgaaagcctgaacccagtttttatgtttatttattggcttggtgattcctgacatcatacttacgcatagcacaggcttggggttttacttcttctaagatactaacttgtttctctttccacttccttattgcttccctgggttggttggcatagttataatggcttgacgttgaggtcctgtctttcttctggggtctcagtcactactcctcactacgtatggtctccaagtcatgttcactgtcactttgggagcattactcctcattcccactcctagtggaatattaaatccagtattctcccagacctctgcaggctttcaaacttatcactcttcatttaaattcattcttcgtttctcacatctagttatatattttctctgatacacctagtaatgtattgttacatttttagctaccatttctttgtgtctaaagaaatagggcatttgttttagttctgacaaccctttatgttaagggtcaatagagccatcgaaatgtttttctctccagattttattcatcagaaaggctgctttcctttaggaagttgtcccacaaaatggtttccataaattcaatcaattggtaagacagaaggtctcagttgaaaactatttcaaatgcaaactactaaaaccatcagggaggtaaaaatctaatgtttcttgtcaactatatagaaaaatatgtttttgtaaacaattggttgagtttaaactacaaaaaactacaaataagaagcattacaactatttagacatatctctacttactatagaacctttgctgtgaagagctaatctcatggtaatattttgccaagatgatgaaataaaatgttaacttaaaataaatatattttatttggctaccattgttatttctctttttttctggagtacactatcattacatttctttgcacctttaacagggaaattttaggacatgattatatgcatgagccctgggtcacattttaagccacaaaaccagaaagacaagatgtttctaatgtttgatgctgtcccttctattcaactgccatatatgctcatatattttaattttttaaaaatagagacaaacttccactatgttgcccaggctggtctttaagtcagacaaatgcaattacttgattccaagatggtagattactggtttgtttacaatagagagaaactaggaaacaaaactaaatatttaaacaactatgggacatctaaatgacagaacgttatgcaactattaaaacaatgtttttgtagagaattaaatgatattagtaacttatcataacataatatcaagcaaataataggacatacaattgtattttgaagaatatgtatatgtgtttaaaagtagcaaaatgcaacatagtataattttagaaatgctaataattcctaggtcattttaggttgccttgtgttatcttgtattttctttccatactttgaaagttttctacagggaataaaaattacttttataataaaaatccaagaaaaacatattggtgttctgatagcaaagtttaaataatcatgaaggcagagttcagacttttcaagaccatgctgcacagaattatgagtgacaacaacatgggttatgccacaaagaatcagctgtcaaaaagaagaggaaacaaatatatcaaagtaggccagaaaatttgctcatcagtgctgtctgctagaactttctgtgataacagaaatgtggtatgtctgtgctgtccaatatgatagccattagccacatgtggctacagagcacttgaaatgtgactaggagatgaaggaacagaatttttaatttaatttaagtgatatttaaattttttaatttaaatagtcatatgtaattaatggcttccatgttggacagcacaaatctccttcgtcacttaagggttattgcctattcattagtgggaagaataatatatttatatcaatgatatgttaattatatattaaaaataaataattatagataattatagttggcagaactggcctagttattttccccacaacaatgctgatcttcctatgatgagtccaagattttgcaacatttggcttttgctatggtttggatatctgacccctccaagcctcatgttgaaatctgatccccatgatggtggtggggcctaatgggaggtgtttgggtcatgggtacagatccctcacgaatggcttggtgccatcctagtggtaatgagtgaattctctttttagcaaccataagagctggttgttaaaaagagccttgcactttcccacctcacttgtgcttcctctcttgcaatgtgatctctgcacgtcagctctccttcaccttctcccatgagaggaagcagcctgagggcctcaccagaagcaggtgctggtgccatgcttcttgtacagtctgcagaactgtgagccaaataaacctcttttgtttataaattacccagagtccgctattccttcctagcaacactaaatgaactaagatagcttttaattacaacggtggcatctgttactactctgcattctcatcttcattccaggtaagtaaattttaagttttggcttctcttagttccaagacacaacataagtcattccctgtttttgggaggagagagtcaggatggagaaaagaataaaatttattgaaaatttaaaattaagataattaactatgtgaactaaaagtgagtaatataataccttctcccagaaaagatcaggacgggagtgttacaaagctttgacatttcttaaagtgcactctgctgcattttgtgtgtggtctatgtgtaatagctcatcttcaacacacacatacaaacacacactcaagtgtgagaataaaattaacttattttcttatgtaattttggagtaagtttatttagagtcatatgttttgtatttttattgaaatatatgcttgttacctgcagttttgtaaaaggatagcatttattctctctctcttccttcctctgtctctctcaaattgcccagagggattaatcaacagaaatctaaattttagaaaacctgctttaaaagagtacttgttctctattttgagtttatgggacaaatgaaactgttctttcaatgggtgttggcaaagaaggtctggaaaagtttatatgaattgccaagcatggaatattgatcattagccaatcaagctggatgatactggacattatacttagtccacagaagaataatataggtatatggatataaacatatttttaaaatgttgaataagggacagttcagatctttttcaatttcagttcataatgcatggtattttcaatgctccatgcatggctaaatacacaaacatcataaatgattctaaagcatgatagggtgcttgcccttaaaaattaccagtagctaacacttttgccagttcagggtacaaaaaaaataaagaccaggagatgctaaaatgatccatatcactatggttataaactttgaaacttacaatgcacaccttaaaatcaaagtttccaaggaaaccaatgaatatattttaagacaagaataatatgatttgcaaatcaaaatccatttaagactgttgccacagcactatgtgttgattggtgcttgccatatttttttaggaagtcagaaaaaaaaatcttatgttccatgaatccagcaataactaagactgcaaccctgattttcttacccgtctgccttgttaacatgatatatgtcaaacataatgaagaatatgtaaaagaacccttgttaccaacaaagattttgcaatatcttcaatacagagaatagaagaaccagaaagaagcagcgacaggtaggcggagagaggaagggaggaaactactgactgagtaaccatgtatgattgggaataaaatgggatctcaaaatcagattccattttgcacccaaccacaactgagaaaactgaggctcaaaaaagtgaagtcattgacacaaggtgttgactattaattgctgagtcaggatatgaagcccagttagtctgattccaaaacttatattcttcctggtggatcagacagaaggaatgggaaaatgcaatgcactcagggtgctcagtggaagcgttggagtgtggagttcaagtcctgagcgaatgtattcctggataaagaattagtcatcaggggaaggtcatgctggagctacgctgaagggtaaagtttgtttttggactctacctgtttcctctccttggctctaagatgacatgcaccagggatctcacctctaatcccgccattgcatgaagagaatgccttgcacatgactagatgctcaacaagtatttgtaaatgtgcatcttaaaaattggtcatgtcagttacgatgtgaaattcaccagtgaaaatgctagctggggctttgaacctggagctactaatttcccaggttccatctcataccatctgcccggcatagtcctaccacccatattgccacactggttttagcagggcaatcctctgaaagtatttttgctacagtggcttgaggcatagtaatactagatggagactaggaactctaagcaaatatctataaagttcacaacaaggctgtgttgatcactctggaaagaggtggtgaaacgattctctttgatgactcctcctgtgtctgcgtatctgtgctttggatagcccacacaggtacatcattaaatgccctcccagggtactgcaccagcctttgagcaggatttaaccttcagagtgcactcagcaattgcaaagtagtgtgctggtgactccattcccagacgtccctcttgacacactgaactctagagtgtttcatctcgtggtatgaaccaagaattggaacagtcacttgggcagagggattctaggtcctccgtataacctaagcaaagacatttttcttttccaagctagaaaaacatgcctaaaacagaaataagtataagcagtctttgcaagccttaccatttctacctccctctggggaatccaacctgtggtatagcactggacctggacaaatagcacagtgatctactaggagtacaatgtgttatcactgttgcttttattataacagctggcagctggccaaagctttgcaaagaaaccagaaagcaacagcagggcactgggctgccttagaaaaacatttcttggctcaaagaggagcctctttaacaagaacccaacacctcaaacctagcaaaaaagcatagctcaggtcaatcacataaaacacagcttcacaaaatctgtcccataacaaagctagaaatacaatggtgtaataaatttggtatacctaagagcctgagaaaaggtacagctgcttaagaataagttatagaaaatctttgttaaatactctagggaaggattcaggcatcttcctacttatctaactttttagtgtattctaaacttggccaggaaggagaggtgtgatcttggcttggtgattcctgtagatctccggactttggctgcctcacctttacctgaaactgttgaatgggatgctagattccctccagctctgacattccatgactaaagaaagtcaaggtttaacactgaccttgacatcctggggcaatggagagttttagtgtatgcaattgtcatgcctgaaaaaatgtcaaaacatggttagggttcctctccttgttcaggagaataaaatagtatattttaaatatgctagtataaatcttataaataaaatagtataaatctcccttctgttaagagaatgtagaaataaaataaataaaatactaaatactaaatagtattagtatagtaaatagaaataaaataaataaaatactaaatcgtagaaataaaatactaaatactaaaataataaaatactaaagtttgctcaaggaaaagatgaagttagatatgtgtttccttttaaggaggttttcatgaaagaattttttttggcagatcacttgagcttaaaaggagtattgttgtttcagaaatagcacaaaaagctgttccccaacaagggatgcagcagaggcagaatgtttaccacctagggtgttagtgaaaggccctgtctctaaacatcccacgttgagataacttcaatgtttgatcaaaaagtaaatcttatcccgtaataagtgagcaacgttctgtttcccctcacccctcaatattgaagcaatgacaagataagtcctctcctgtagacacatttaccaaccaagtgaaacatggcgtcttgtcggccttaaccgctagacttgagagaatggaattttcatgaaataagagtgccgatccataaaatacatgccattcgttttgatttaaattataaacaatcttatccatggtcttcttttatttttattttttaattttcccttccattctttgatttttaaggagtctccttacaaagtcagaacagtttttgtttttaccatagccaccatggttaactttttctttagaaaaatgttcagtgatatccaagggcagaaaaccaaacaccacatgttctcactcgtaggtgggaactgaacaatgagaacacctggacacagggcgaggaacatcacacaccggggcctgtcgtggggtggggggaggggggagggatagcattaggagagatacctaatgtaaacgacgagttaatgggtgcagtgaaccaacatggcacatgtatacatatgtaacaaacctgcacattgtgcacaagtaccttagaacttaaagcataataaaaattaaattaaattaaaaaaagaaaaattttcaatgaaacaaatgcacttcctgaagttactaagcctacacaaatgaatgaatgaacgaatgtctttcctgtagttcttaagcccacatgaacaaatgaatgaatgaatcaatcaatcaacgtctttcctatagttgttaagcctacatttacgtaaaggggagttgctcttacactgacactgtcaaaaccctctacctcccttccactccctccctgccaggtaaaagctccacctaagatagaaggcaacccaggttccaaagtaattcctccctcacctgtgaatgaccagaattattatcctctaagtgcttctattgtcacttgaaaaaggtacctgcttacctgattcaattaattcacaagaaaactaggaggaccgcttggtttacccaaggaattgggactaggaaagtttgttaatgtgaacaagccacctaaatctgtgattctcaaagaaagacctgaattccattgctctgaggactagaaaacagcccagggctgcaagtgtttccttcaggttgcagggaaacaacatgcaaaaaggttatgctaacatttggaacgcacgaactaaatttgcttgttaataaaatttcctgagacctctaattcggactttcctagaaagtctgcctgtcacatcatacgcagcagaatcacaaagttgtgaatgcacacgtccttggataattgggattccagtaattttccattccaagaggatgttttattactgctcctcagtgttctgagttggtcatgattttcagagactgatgtttatgaatttaagttgaaaatttatgtttatgttatcctcatcaatttagtttgttataagttgtttggtgaatcccatacagtgcaatgaagcatatttgcatcaatgacatttctagactataaacttccaattatttcaccaataaaatatgtatactttacagtacaaatgcgagttatccataccccatcttctgaaacaaatatgtctgttttccttgtatattcccacccctagtctacaattttgcctatatagtgtcactttattattatcgctaagttatttttctacctataacttacctagagtaagataacacagccatggaatcttttaccctacctaaatgtgtcataacaagatgtctttgaaactcagctctaaatgctagcatggatggaaaactatggttccatttgcaaggctggcttacagagcacaaggagatacagttatgaaagggctggactacgacagaagtagtaggccaatagatctatatagtcagctttttgtcatgtaatttattaactatgacacaaatgcatttaagaatatcaagtatttctctggctcttgacacagttgacttaaccttttgctgtctaaggaactgaggctttcctgttctgggtgctactggcaaatgttctagtacttgaagtcgggatgcacagcttcaaccactgacttatcagtgcagccacctgtgtattgcaactggccattaaattaaacaccgagccacctgggtttagttcggtcacttccataagtgtatttagcattggtagccctgctttattaaagtgcagcagacgtgctcttctgtcccttctgtcccttctgtttgtggttctttgggaaagttctgatatttgcttttgttttgtgcttgctttcgtgtttttatatcttgtatttatccctgaacatatttcgaacatttttttaaggaaagaaattcttttgtgtatatatagatacttgcatgatatactgtcatcaagtttcggttcctcaaaaggtcttggagctgtcaggtgtgatgtactccaaccatcaaagttctgtggaacacggtttgtatgtaaataaatgtggggcgtttggcccttgaaaccggaagacattacggtaggtgaaataagccagaaacagaaagttaaataacgcatgtgctcattcatatgtggaagctaaaaaatagttgatcttacagaagcaaaaagtagaacagaggaaactagaggctgggataggcaggaggaagaggggttagggagaaattggttaaaggatagaaatttagagctagagaggaggaataaattctagtgttctgtagcactgtaacatgactatagttaacaataatgcatggtttcaaagagctagaaagaggatactgaatgttcccagcacaaagaaataatagtgtttgagataatgaatatgctaattaccctgatctaatcaccgtatattatatgtattgcaacatcactatgtaccctataaatacatacaactattatgtgtcaattaatttttttttgagacagagtctcactctgtggcccaggctggagtgcagtggtgtcatctcagctcactgcaacctccgcctcccaggttcaaggggattctcatgcctcagcctcccaagttcctggaattaaaggtgtgtgccacaacgcccaactaattttttttatttttagtagagatggggtttctccatgttggtcaggccaggcaatgatccacctgcctcggcctcccaaagtgctgggattacaggcctgagccatcatacctggccaattaaaaaaaaattttttttaaagaattctctagttcattcctactatattctgggcaaaagctaaacatctgtgccagacgcatttattgtctttctctctctcaatctctctcctttcattgaagcttccctttaattcccaaataaatccaactcccttccatattgaacaccataccactgactcagcatcatttacatcttgcagggaggttctttctctgtctttttccccttatctattcatccatccatccatctctttctctcatttcattgccaaatatttgggaaagcagtccaaggttactgctgcctttgcttcttcacctctcatcctctccctgaaatctgatctccctacatctctcattttctctcttgattcttcttctggtgatttcttcttaaatgttaatgttctctaggttccaacttgggccctctttttgtcttagtctacatgtcctctctgaatgatctcatccacgaccatggctttaactataacctgactctagtgattcaaaaatctttctgtccaacaccaatctcttgtctttactttagaattggatagccactgcatactgggtgcctatagctaaacatccagctatctgtaagtcttgtaaacacaacaacggtatggaaatccaactgaaaaacactcatgcccagtggaccatgaatttaaggcaagtctgatggtgtgagaaaagcataaaacccagtcagaaaccttgggttccaatcccagctcaattgtttttagtcatagggcaggtcctctatctatctgactgtgatttttcacttgtagagtatggcttactgtactttaaagattttctggccgggcgcagtggctcacgcctgtaatcccagcactttgggaggctgaggtgggcggatcatgaggttaggagatggagactatcctggctaacacggtgaaacctggtctctactaaaaataccaaaaaaaaaaaaaaattagccaggcgaagtggcaggggcctgtagttccagctactcgggagggtgaggcaagagaatggcgtgaacccatgaggcggagcttgcagtgagctgagatcgtgccactgcactccagcctgggcgacacagcgagattctgtctcaaaaaaaaaaaaaaaaaaaaaaaaaaagattttctgtgagggattaaatcagataatgtatgtaaaggtgtgatgtaagctggtaagtgttattccaatttctgatatgctattatttaaaatgtagttggacaagcaggagtaacatttaaaatgagacaaaaagtacaagccaccagaaatgcaaatatcaaattaatttgtcccagtaaactaaatataaatagtttttacactttaatgtacatctgaaagagcttattaataatgtcaatgcttgagctacagcccagatttaattggttgggaaagaggtcagtaatctttacttcaaaatcattccaattgtcacaggcaagtcagggccacacttcaagaaatagtgaaatataatgcacttgagggatggtcaatcctcaaaatattctaaagacttgtaaaggcttcagaactagttccttcttgagaagcacattgcttcttttgctgagttcaaattgtaatgaatttcaaggcttccaattctgggcttcttacataaagcaatcattccttcctcactcccaacacaaacacataatttttaatatataaataaatatatatatttacatttgcatattctgttttcattaatggaatttttttcctgtatactacatgagtaataatgtaaagacacgaaataaaacagacactaattaggcatgtttgaacatctgttgctaccaaacattttctatttctcttttcatatctctgctgatgggtttagatgaaaagactacaagcctgcatacttacagggaggaaggagccaaactggaaaaccagtagcacaggtcggtaggaattaatctcagcaggctcgcttcagcattcggagacacaaccagcaaaacacttccaagctggtggctcagttaatatgtgaagctatttttagtacaacagagagcatttctagagattgagattataaaccagggatacatcccaaacatattaatatggttttaattttattttacagataccatgtttcagaatattttaatctccatgtgaataattgtttttattttgtatgtatgcatgatgtaagtatgcatacagtacatttatatgcacgagcattattcatatacatgcatacctacatgtaaaaatctgggtaagagagtaaatcagatgttttagtccttgtatatataaggtaaaagccagaccttttaatgacttacacatttgatcaggaagttttgtgttttgaaatgacaaaaacttggaatattttcgaaaggagtagaatactttcggccataattttcatttttaagatgccttaaatgttttagttccttttaataaataatcttacacaatgagttggttctcactgtcgtattaggtaaatgggttttgttgttgttcgtttttgctaaaatgggttttgttgttttttgtttttgctaaaacgaaaaaacttcctttttattaaggaagttatatgaaagtccatcacttccacaaattaggaggctacactactgcaatttggctgaatcagtggatatttttaatgttgcttattttgtgctttaaaattgcagttatcccagagcatctgtaattttgttttttttttattttgaacaaactgttatctgttaaattaacaataagaaaaatgttattttatctatgtttattcattcttcaaaattcttccttttgttttttttgtttttttaattttcttttttttattattattatactttaagttttagggtacatgtgcacattgtgcaggttagttacatatgtatacatgtgccatgctggtgcgctgcacccattaactcgtcatctagcattaggtatatctcccaatgctatccctcccccctccccccaccccacaacagaatgatgatgagatattcctggtaagatgtaatgttttatttttcttcctggatctatctctgatcttgttccagggcacatcaatttagaaacactcatcgattatgatagctttgagaacaaacattggaacattaacatgctaattttgttctttacaggttgatggtagaaaatgtataaagtttaaaaacatgcaagtcttattagcattctgcttagataaatacaatcttattttatttctctctccttttattcatgccctgccaattgagagtgccaggtttctctccttttctgtttcacagcagctccaaagctaaagggaaaccaaggtggaaaataattaccccaaaagagacattttccatgacactaatggctggatttcagatactttccaaagctcattggaaagggagaactcatggagaagaaacaaccaactttaagtatcccattactctcagaggttgactcagagcctattccatgtagaaatactgaagagggtgtaaaaaagaacgaaaagcagaaacaaaataaataaataaaaacaacatagtcatgctttgtttatccttctttcccttgcaaacatctgctctctggagtctgctctggcatttaaggagcttggaagtcatccctcccatccaatctcacaaagaaaaaaaaagctgaagaagtaaaaaccaacaattcctctgaaatccctcagaggattgatgtcagagggcaaaccattgaccccatgattggagacaaagacagaaatgtacagagaatcatgacctagagtaacagaaacctttgggaaaaccaacattgggatagaaaaacttaaactgcaactgattagttgttcgaggctcaatgtggattaatttgagcattaaaaactcctttgaggatcagggagcagttttaagggggctaccacacatttgtgacttttacttccaggagccctactaggtttgcacaatgagggtcagggagaaatttcctaatgcttccaacaaggaacagggaaaaagtaaccattccgaaatacacccaggtcactctgttcttcttatggcctgtctcaaaagaaactgtattacccagagcccaacagactgagattatagcagagcctaaaccaccggggagtagggaaatatccaactccagcccctctatccttcccattgcacctaaagaggaaaaacccccaaaacccaaggagcacatgtggagatcatggcccaggggtagaggctcactgtgggactgggtcctaatcatcagattatacaaagcatcccccttcccctgcaccttaccacaataccagtagggctcctgtataataacagatgaacgcaacggaaagaactgtatgacccatgccttatttaagaagaagtttctaggaaaacccaaagacaacagcggggaataaaaacaaggacatcagaggagatgttagcctctaaagcctctagctacagcaaacagtaaacacagctcaattactagccagataaacataaaacctcacagtaatggcctgtatgcctcatttatttagtacatcacatcctactgtcaacaacaaaaaaaattccaaggcacactaaaagacaaaaaacacagtttgaagagtcagagcaagcatgagaaccagactaaatatggaaaatatatgggaatcatcaggtatgaaattaaaaggaactatgatgaaattcaagaaataaaaaacataatagaaatgaagaatgaaaaattagttcatcaatagactggacatgattgaggaaagaatcagtagagtttggacatgtgtcaaaagaaacctccaaactgaaatacaaagagaaaaaaaagtataaaaaagacaggaaatgtcaggcgcagtggctcatgctgtaatcccagcactttgggaggccaaggcagtctgatcacttgaggccaggagttcaagaccagcctggccaacatggtgaaaccctgtgtctactaaaaataccaaaaaaaaaaaaaaaaaaaaaattagcacatggtggctcatgcttgtaatgccagctattaaggaggctgagcatgagaattgcttgaactcaggaggcagaggttgcagtgagccaagatcatgccattgcacttcagcctgggtgacagagtgagacactgtcaaaaaaaaaaaaaaaaaaatagagagagaaagagaggacagaacagaatgtctaaaaactgtgggggtaattataatataaaaggcataacatacatgtaatgggaaaatcagagaagaaagaaaagaacagaagacatatttgaagcaataataactgagattttccccaagttaatgacagatattgttatgagcttaattatgtcctcctgttcccccagcctcaacttatgtcaaagccctaactcccagtaacctcagaatgtggctgtatttagagataaagccattaaagaggtaatgaaggtcacatgagatcataagggtgaggtcccaatccaatatgactggtgttgttctaagaggaagagactcaggagatgggcctatacagggaaaaggccatgtgaggacacgggaaggtggccttctgaaagccaaggagagagcctcaagagaaatcaatcctgccagcaccttgttcttggacttccagtagccagagcacttctaccctcatatttattgatgagataataaatttctattgtctaagccatacagtctgttatattttgttatggtggctctagtaaaggaatccaccaagccacacaacaaggaaactcaaacaacaccaagcacaataactatcagagcaaccacagacatatcacattttgacttcagagaaccaaacatgaagagaaattttgaaaggagcgagggtggatgggatgagggaaaccttacctggagagaaaaaataaaataactgctttgaatttctcatcagaaaccatgcaagcaagaagagagtggggtgatagatttaaagtctctaaagaaaaaacccattaacctagaattctgtatcttgtggaattatcaaaagtgaaggaaaaacaaagactttcttagaaaaacaaaaactgagagaatttgttgacaaaagacctgccttgaaaagaatgtttaaaaacagttcttcagaaaaagggagaatgatataggttgaaactacataaagaaaggaagactattagagaaggagtaaatgtacgtcaaacaaaatctctttatagaaagtttcttaattgatctgatggataaaaaagtgttcaaaatgataccagcaacaatgcaattggtggttatagcctaaaggaaaggaatgacagcaatattataagagataagaaggagaaagtaggaatactctgttatgggatagttgcattacatgttaagtgtacagtgttacctaaaaatggacttggattcgttgtaaatgtatattgctaactctagaaaaactgtaagacatttaaaaggaattataattgatactgggcaaaaagggaaaacagaattatataaaatgttcatttaaaatcagagaaggcagaaagagacaggaagacaaaaggaaactaatataaaacagttataaacattaatgtaacagttatagatattaaaccaacaatattaataaccactttaaatgtgaatgatatacatcaagtaaaagacagggactatcagagtggatataaaacagaaccaactatattctgtttagaagaaacttgctttaaatacaaagacacagattaaaagttaaaggatgaggaaagatatgccatgctaaaactaatcaaaataaagctaaattagataaattaatttcagacaaagactctagaaaaaacatttttcagggataaatttcttttattgcataacaacagaaggttcaattctccacaaagacataacaaccttaatgtgtatgtgcttaacgacagagcatcaaaatacttgaggtaaaaactgacagattacaaagagaaatggatgaacaattactatcactggaggcttccacacacatatatctgtggttgacagatctagcaggcagaaaatcaggaaggacagaatcaaactaagcagcaccatcaatcagctgaatttaatggccatttatagaataattaatgcaacagcaacagaatctatagtcatctcaagttctcatgacatgcaccaagatagaccacattctaggtcataagacacaccttaaaaatgtaaaagaatagaagtctttcaaagtatgatctcaaacaatagaattaaactagaaatcaacaacagaaagaagctggaaaatctcaaagtacctaaaaattaaacagtacacttctaaacaacacacgggccaaagaagaagtctcgggagaaattttaaagtatttcaagctaaatgaaaatgaaaatacatgttatcaaaattcacaggatgtagtgaaagcagtgcctagaaggaagttgaatgcatatattagaataaagaaagatctaaaatcaataatctaaattcccatcttagaaaactagaagaacaaaagcaaattaaatctaagccaaacagaagaaaacaaataataaaaatcagagcagaaatcaataaaattgaaaatcaatagagaaattcaacgaaaccaaaatctgggtgcttaaaacaattaatattgatgagcctctagccaggctaattaagaaaaaaaaaagaagacaccaattactggtataataactgaaaaggaggccatcactgctgatcccctttatcctaaaaatagtaaaagaatattatgaacaactcaaccccacaaatttgataacaaatttttggttcaaaaatttgaaccaagtttttgaaagatacaatctactgaaactcacactaggagaaatagataatctaaataggcttatacttattgaagaaattgaatcaacaataacaacttaccaaaacagaaagccaccaagcccagataacttcactggggaattctaccaaacatttgaggaagaaataatactccgtacaatctcttccagaaaatagaagcagaggaatattttctaactaattctacaaggccagcattactctaataccaaagtcattaaaaaattaccaaaaaggaagactacagaccaatacttctcataaacatagatgcaaaaaccaccaacaaaatattagcatattatatccaacaatgtataaaatattatacatcatgaccaggtgatatttattccatatatgcaagaatggttgacaatttatacattaattaatgtaacccatcacatcaacaggctaaagaaaaatcatgcaatcatatcaatacatgcagagaaatcatttgccaaaatctagcaccagtcatgataaaaacccttagcaaactagaaatatagaggaatgctcccaacttgataaaaaaaaatgcctacaaaaaacctacagctaatatagtacaaatgaaaagtctctcttctccctgccctcatgcctaagtcagagtctcctaaagaaccgaacagctgaggaagctcttcattggagggctgagctttgaaacaaggtgagagcctgaggggccattttcagcaatggggaatgctcatggactgtgtggtaatgagagattcaaacatcaagagctccatgggctttgggtttgtcacataggccactgtggagaatggggatgtggccatgaatggaaggccacacaaggtggatgggagagttgtggaaccaaagagagctgtctcaagagaagattctcaaagaccaggtgcccacttaactgtgaaaaacatatttgttggtggcattaaagaagacacagaagaacatcacctaagagattattttgaacagtttggaaaaattgaagggattgaaatcatgactgattgaggcaatggcaagaaaagaggctttgcctttgtaatctttgatgactatgactccgtggataagacggtcattcagaaataccacactgtgaatggccacaactgtgaagttaggaaagccctgtcaaagcaagagatagctagtgcttcatgcagccaaagaggtcgaagtggttctggaaactttggtggtgatcgtggtggtggttttggtgggaatgacaactttggtcgtggaggaaacttcagtggtcatggtggctttggtggcagctgttgtggtggtggatatggtggcagtggggatggctataatggatttggtaatgatgccagcaattttggaggtggtggaagctacaatgattttggcaattacaacaatcaatcttcacattttggacccatgaagcgaggaaactttggaggcagaagctctggcctctatggtgatggaggccaatactttgtcaaaccatgaaactaaggtggctatggtggttgcagtaacagcagtagctacggcagtggcagaagattttaattaggaaacaaagcttagcggaagaggagagccagagaagtgacagggaagctacaggttaccacagatttgtgaactcagccaagcacagtggtggcagggcctagctgctacaaagaagacatgttttagacaaatactcacgtgtatgggcaaaaaacttgaggactgtatttgtgactaattgtatgacaggttattttagtttctgttctgtggaaagtgtaaagcattccaagcattccaacaaagggtcttaatgtagatttttttttttcacccatgctgttgattgctaaatgtaatagtttgattgtgatgctgaataaatgtcttttttttttaatgtactgtataaagttagtctgctctgaagccatcttggtaaatttcccccaacagtgggaagttagaattccttcagggtgatgccaggttctatttggaatttatacacaacctgcttgggtggagaagccgttgtcttcagaaaccttgctatagttgaactgatagttactgttgtgacctgaagttcaccattaaaaggaaatagccaagcaaaatcataaaattattggttataaaaatgagtgttggcacatcttatgcaatatactaaattgaataatggtaccagaaaaaactatagatgggaatgaagattgtgtaacatctattatcatgtgtaatcaataaatgatttaattctcttgaagaaaaaaaaaactagatgctttcccactaaaataaggaaaaatgcaagaatgtcccctctcgctactcctatttgccattgtactggagtcctaggtaatggaataagacaagaaaaagaaaaaaagggtatatagtttgataaggatgaaataaatctttgttcaggaagacatgtttgtctaggtagacaatctcaaagaaacaacaacaacaaaaactcttagaactaagtgatcatagcaaagttgcagggtacaaaaaaagtcagcggttttcctatgtaccagcaatgaaaaattgaaatatgaatttcaaaacacaatactatttatgtaagcagcaaaacttaggcatacatctaacaaagtatatagaagatatatattaataagagtacaaaattcttttaaaagaaatcaaagatcaaaatcaatggaaagacataccaaatatgtggataagaagactcaatattattaagatgtgagttctttccaacttgacctgtgaattcaatgcaatctccatataaatcctagcatactttgaggatattgacaaaccgattccaaagttgaagtggaaagcaaaagacccaaattacacaacacaatactgaaggaatgcaatgacagagagttgacactaccaaacttcaaaacttactataaacctatagtaatcgaggcagtgtggtattggcaaaagaagaaaaaaaataaatcaaggaaaaagaatagagatttcaggaagagacttagacaaggtagaaaaggtaatcgaatggagagaagatcctattttcaaaaaatggtgctggaacaactagacctctacatgcaaaaaaaataaatatagactccagattttactaatttcacaaaaattaacttaaaataaattatacaactaaaaataaactgtaaaactataaaacctttagaatataacataggagaaaatctaggtgaccttgagtttggcaatgactttttagacacaacatcaaaagcacaatctatgagaaaaaattgtaagttggaatttattaaaatttaaaactttgattcttttaaatacaccattaagacactgaaagacaaactacagactgggggaaaatctttgcaaaacgtatctgataaagcactggtatccacaatatacaaggaactcttacaattcaacaataagaaaacaacacaattaaaaaatcggcaaaatataatatctgaacagaaaactcaacaaagaagacgaacacttggcaaatatgcatgtgaagaggtgctcaatatcatatgttattagagaactgtaaatttaaaaaacaatgagataccacatctattaaatgactaaaatccaaaacattgaaaacactaaatgctggtaaggatgtggagcaacaggaacttgcattcattgctggtgggaatgcaaaatagtgtagccactttggaagactggaagtttcttacaaagctaaatatactcttaccatatgatccactttcctaggtatttgctcaaatgaattggaaacttatgtcttcaaaaaaattctgtacatgaaggtttatagcagctcaactcgtaattgccatatgtggaattgattaagatgttcttcaatgggtgactggataaactatggtatattcataaaatggaatattcagtgataaaaagcaatgaaatatcctgccatgcaaagacatggagaaactataacaaatcttgttaagtgaaagaagaaaaggctctacactgtgtaattccaaccctatgacattctgtaaaaggtaaaactatggagacagtgaaaagataagtgtgtgccaggggttagggtaggggtatggataaataggcagaacacagagaatctttagggcagtgaaactaaatggtggataaatgttatacatttctgaaaacccacagaatgtataacacaaagaattaaccctaatataaactatggacttttgttaacaattatgtattaatcttggctcattaattgtaacaaacatactatattatggtaagtttttaattataggggaacgtataggtggtactgaggcattttgttggaactctctgcatattttgtttaattttctgtaaactttgagattctctgaaaaaaatgaagtccattaatttttaaaactctgctccctagaacatgattttaggagccactaacacctggcttcaaaaacagacatgcagggatggattcattaaaagtgaatgacaaaggcttggaaagttcttcagaggacaataaaatagaactgtagaggccctcttacagctcttataaaacaagcaactgtgtaaattaaatgccaaatggaatccagatgaaaaaaaaaaaacacacacaatttgtcttaacggaatggatatatttgaaagcactgcaatgttttagataaagaaataaataatgtctacttttagaaaaatgaatttctttcactttccccaatatcttaaattctcagttttctaatattatagataatggaattattaatggattatgcagatatttaaggcactgttattttatcagctattcaaggttcaagacacagttctaaagtcatataggctattaatttggttttatgtgtttatttcaaaattcttttaaattagttcaccatgtatttgatctctttagttggtcataaatcccttgtcatctcttccccaaaacaaaactttggatatggcaagctttctaccaatggtaactgaccaacttaaaatctgtccctgaaggaaaaattactatttatctcaaatctgctataattattttatgtcagcctacaattgctgtggttggccaactagaatactttctttttgctggcctcttattatcatgtatgaaagatgtattgattctcaacatccttttattattactttagtatggttttggcaagtggaacttcatcttgtctagttgtttgggagcactagctacagtctttctccatgggtctgaaaaccttcacaacatactggagaaaagacaggccttccattgaacatttactgaggcataaatcatcaccctacaagataatgcgatgttttgaacaactttaattgtttaaattgggaggttcttatgtggggaacaaatttttccttctgcaactgtcatatgttggttttgccatacacaccagaaagtctgtatctctcccacacacatctctcccttccatactaaatatgtattttttctggctaaatattccttgtccttcaaattcaaaatttaatccaattcaaaaattaatgtggttaccatgatcttgacaaaatctacattgtaattaaggtcttttaagatagcccaagaaccaaatgtaatattaattgtattaccactaggatggcgtgagtgatgcagtcacctcaggtgcaaaatctaagggagtgtcaaaaaactcggtaatcaaaataaataatattttaatgcaatatttgcaaaaataacattaatcaaaataatattttagtgcagtatttgaaaaaaataaaaattaatgcaaaaagttcaaatggacaaggatttgggtgtgatgggtgagatgagtcatacaagtaagtacaggggaggctcctgtcttttttggacatttcaatttcttggagttaaaatcctatttggatattagagattcaacccttgaaaggagccagcctaaagacattgttccatttgtactcatttctttttttcaataataattttaatttttagtttagattcagggggtacatgtgcaggtttgttacatgggtatattgcatgatactgagctttggggtatgactgatcccaacacccaggtagtgagcatagtccctagtaggtactttttcagcccttgcacccctccatcattccccccaccagtacctgccagcgtctattgttctcatctttatgcccatgtatacccaatgtttagctccctcttataagtgagaacatgtggtatttggttttcttttcctgtgttaatttgcttgggataacagcctccagctgtatccatgttgctgcaaaggacatacttttattctttttcatggctgtgtagtattccacggtgtatatatattacattttctttatccagtacactattgatgggcacctatgttgatttcatgtcttcgctgttgtgaatatcgctgtgatgaacacataagtgcacatgtctttctggtagaataatttattttcctttgaatatatatccagtaatgggattgctgggatgaatatagttctagttttagttctttgagaaatctccagacaactttccacaatgactgaactaatttacattcccaccaacagagtataaacattctgttttctccatagccttgtcagaatttgttatttattgattttttagtaacagccattctgactggtgtgagatcgtatatcattgtggctttgatttacagttctctgatgatctgtaatgttgagcattttcttgtatgtttgctggctgcttgtatgtctttttttgagaagtgtctgctcatgtcccttgcccactttttaacgggattgtttcttgcttgttgtattgtttaagttccttatagatttttgatattagacctttgtcagatgcatagtttgcaaatattttctgccatcctctaggttgtctgttaattctgttgatagtttcttttgctgtgcagaaactcttcagtttaattaattagttttatttagtttaggtcccacttgtcaattttggtttctcttgcaattgcttttgaggacttagtgatgaattatttaccaaggccattgtccagaatggtatatcctaggttttcttctagggtttttatattttgaggtcttatattaatctttaatcgatcttgagttagtttttgtatatggtacaaggtagcggtccagcttcattcttctgcatgtggctagccagttattccagaatcattattaaataaggaatcctttctccattgcttatttttgttgacttggccaaagatcatatggttatagatgtgcggctttacttttgggctctcaattctgtttcattagtttatgtatctgttttgtgatgtgtataaaatggtcatttctaggaccctttgtgtgcaatgtgtgtgtccagaggtaccagtaaaaaccctgcctcggcttctgtttcagtttgctacaactgacactgtctctacttcttaccaaagctctcttgagttttcctgtgcctttgtctcgagcccacactgcaagtccttagtgctggatctctcttgatgagcaaatacatctgggaaagcccatttctgactccactttaactggcttgaattagaatgctttttgtacttgcacacaaaataccagaaatcttatccaacttgattttcgaagaatggagtttataaagatataggccttttagtccgtattggcttgtcttagttattgaacagaatcaaaacattccatttttctataaaaccaagataattatgaaaaagtagtttttcatatcaactgatctattgaggcttatgttcagcagaacctacttggtaagtttaaactggggatggaaacaggtcaggatactaacaaaatgaaataaactggttttttttgttttgttttgttttgtttgtttgttttttgagatggagtctcagtcaccaggctggagtgcagtggtgcaatctcagctcactgcaacctctgcctcccaggttcaagcgattctcctgactcggcctcccaagtagctgggactacagacgtgcgccaccatgcccagctaatttttgtatttttagtagagacggggtttcaccatgttggccaggatggtcttgatctcttgaccttgtgatacgcccacctcagcctaccaatgtgttgggattacaggcgtgagccaccgcgcacagccaataaactcttctttaacctgccttatgcaataaagtccctgtgccccaaagttgtcttagaaaagacagcctaagtagttactgtgctttggacttcacagcccaagtacatcacaccatcaatatcctctttaaaagccgggagtgaggttttataaaagtatgctttaaacaaatggcagcaggaaattcaaagttgggtaattcatattgctgctataatttgtttgcacctaaaaagaaaaatcgtagaaaatgaagcatcattgcctgcaggtacagacacgtatggtgtctgagatcattgttattctcttcctctcatttttctcccatatcctcttaatggaataattacattattgtaatttacttgtatataattcaggcaagctaagcacaaccaataatatgtttcttcagaggaaaaaaacccaaacataataattaaagaataaattagttactgtaagtagcaagtattccaggtttggggagaaagtgtaggagatgatcccctcagaaatggacaccagtggatggtaacatgtgtgggaacaagagtgattccatcttggatgctaatctgccatgttggctcctgattaaccctgagtctgggaatgcctccaaggtgtctagttgatgatttactctctatgtagaaacacttatttactctgagttacacctttcctccacaacaacccttgatcttgttgcatacattacccgtagctgtaacacccatagcattctctcggccacccactcattccttccagagcaaatatacttttcctccaggatatataaaccctgggtctggaaggttgtagtgcgaaggcctacctttcttgtggccacccaagaccacgcttctgtctgtaagttccccaataaatcacccttttccaacacactggatttttctgctctgttctttggtttcttggctccttctgtatttggtggacacttcgcatatatgaccctttcacggaacaatgtgaaacttaaacatgcagcattttgggacgatctactttaagagatgttctgtaaatgatctgctgtgtaggccatgacatttcctcaggctcaccactgaaacatcaacctactataaaatgataaaacatgtgctttaaatgtgagcactctaacatatttatgaaagatgacacaacagatgggcagaaagaaacactgagaatgggaattttattttctttataatttttttttttttttttttttttagacggagtctcactctgtcatccaggctagagtgcagtagcacgatcttggctgactgcaacctccatttctcaggttcaagcgattctcctgcctcagcctcccaggtaagctgggattacaggcacgccctaccacaccctggctaatttttgtatttttagtagagatggggtttcgtcatgttggccaggctggtctcaaactcttgatctcaggtgatctgcccgcctcagcctcccaaagtgctgggattataggcgtgaaccactgtgcccggctgggaatttgcttttcaacagggaaaagaggcagtgtatctgccaggcaataatgatgacaagcacaaaacactaatttcaatgtattgagtatgtgagaggaccaatactagtttccttagctgtattaatttgaattattttaacaactttaggaagtcaatatgatttctgtttgaaaagtgagcaaacttaggctcagagatattgcacgcctaaagtcacacagttggtatgtggttatgacagtatttatgttcaggtctgtctgcctccaatgcctgggtttttctctatgagctccctcttagctgttccagtgttcctccactagaatttcatattctttagtgagacaatctccaggcattatcctagcttgaataaaatgctccagaaagttctccaactcaaatctacaaatcagtagtcgttttgtaaaataacttctttctccaaggacctcagttttgaggaatgtgtgccctggatgaagaaactggcattctcactactggaaagaaataattttgtctccgtattaatttttcggtattctggtttttagatttttttttcatgagttatgttagtttcgactcttttgactagagcctgaccattcttggatgatcgactaaattcaagtttctgaaatgacacacatgagagatagctttattgattttctatgaattttcttattttttcttcttataaaaatgtctctccaggagcaacaccaaagaaagccaagctgctgcaaagcttctcactgcctttgtatattatgccagctcctctacctcaaacgcttgccctgccttctcatctgaaaaatctttcctcttaagatccagctcaaatggtaccagttctctcgcaaaatcattctggaagaccccagggaaagtcaatttctcattcttttaaacattcacataattttgcatatatcactctcctattcacttgacactctacagtaactccttctgtataatcctattttcccatctagcctgtgagctacccaatggtgtcaatgaactcagtcccctttgcgaacctagcatcttctactgcactggcataggaagaaaaatactcaataaacacttgcagaaatgacatttaaaaaccatgcaatcttgtctttgaaaactgtactgttcaggaagatctaagaagatgaatacttactaggggctctttttctccttgaagagcttgagtgaaataatggctgttgaaccaagtttgttctaagttcactgaacttgatttattagcattgaattttcttttttagcttttttttttttttttttgcttgtaattggcctcttcatgtttaacacaaccctccacctataaaaatcataggatacttcacagaacagtgagaaaagcggacccttgggacgtcaagggacttactaaaaagcacacagctaagtgggagagttgaactagaactctggttctatgggtctattttttattctttctagtaggccaggttgctatgacaaaacaataacccctttaagcttatttacagctctttaacctaatcagaaggctttctttaatagttgcagagggcaccataccacagagaaagttgtcacgaggtctggtgactttccaaacaaagccgcttatcaattcaatgttaaaaatattggtcccatcctgagaactgtggtttccttttcttaatgaaaaaagcaataaaacgcaagtacacatccatctacacatacaggctgtcaataataaaataatgagagatggcactgaccataatctgtgttttccggctcccaacaatttgatggccaaaaatagggggtctgcggaatgaaaagaagtggaacccagattagacaaataaaaaattagtggagtttctggccagtgaattacatttatcttccacaattctctatattagtttgctatatgttttataatacagaacatgttccaagagagacattgaaaactctttgtctacatgtactttgctgaccaattgctcagcttctaaacatgtgtagtaccagcaagcaggtatttagaatgtcatccctttgctgtaattttacaccaactgacataaaggcaaaaaggtctgattgtatattcaagcaaaaagtattcatccacagagaggactgaaagagtatgttcggcaagactcaggatgaaatatatttaaatataacaaattgttttctatgaatcatgtatttcaacactgcttttggtagctccaaaaagctcaaccaaccgatagactctttctctgagatctgacaatgatttgcctggctccattagtcatataattcagttctcagcattgtccaatgagattaaagcaactttttactctcacttttaaagacatttcctaaattcctcttgtaactaatttctaccatttagtcgtgcaacagggtgactcgagtcaatagtaacttaattatacatttaaaaataactaagagtgtaactggattgtttgtaacacaaagaataaatgcttgagggaatggagatcccattctccatgatgtgatgactccacattgcatccttgtatccaaacacctcatgtattccatacgtataaacacctattatgtacccacaaaaattaaaattataaaatttaaattaaaaaaacctacaaaaaataaataaaaatagaaacatttccttacaaagacacttgtttctctaaagttttaaactgcacaaatcagagattttttttaaaggaatagtgtcttaattgagtgatacaatctgcaataggcagaatccagattctgtagaatctagaaactgactgactaaactacaaagaaaatgtctgaccgagagaaactttattattatcattaacatttatattttctaaaaggactttcctagccctgctagctgaacatgcttggctcctgaccacgaagaaacctgatgatcacctgtctccttatcaacccctagtccctggaatgatgaggcctgcaggactcactgtaacagtgatggcaaatatcagtactgtgggcttaattctatctgttagctaattacactaactaccatgtgcaataagcatatttggagtcatctctgattatctgatcattttcccctctagaagagagactctaaagaagggaaaatgggtagatagggagaactgtttgaatctctacagaaaagtctttccaaactgtctcagaggcccccccgactaccatcacccagggatttcaacttaccctccgttctttcttgggaattacagtagtaaaataaagaaggctactaacagtagttttgtgaacatgagaacaaaatcatcgtaggaattctgaagaaagaaaaaaagactaaactgctagacaaaagaggatagtaagactttatgtgggtcacccttatcaccccaatctcacttgactccataggagatgaagctttgagaattcgatttcttaaaaataaaattgaatcaggattctaggatagccctagggggacaaagtagttaaaactttgctttcatgtagggtgtcactttttttttttttgagacagggtctcactctgttgcccaggctggagtgcagtggtgcggtctcagctcgctgcaagctccgcctcccgggttcacgccattctcctgcctcagcctcccaagtagctgggactacaggtgcccgccaccacgcccagctgagtttttgtatttttagtagagacggggtttcaccgtgttagccaggatggtctcgatctcctgacctcgtgatccgcctgcctcggcctcccaaagtgctgggattacaggtgtgagccactgtgcccggcctaaaaacgattttctgatatgctatttcttaggttttataagagatatatttctactttggtatctttctttttttttttttttttttttttttgagacagagtctcgctctgtcgcccaggctggactgcagtggcgcgatctcggctcactgcaagctccgcctcccgggttcacgccattctcctgcctcagcctcccgagtagctgggactacaggcgcccgcaccacgcccggctaattttttgtattttcagtagagacggggtttcaccgtgttagccaggatggtctccatctcctgacctcgtgatctgcccccctcggccccacaaagtgctgggattacaggtgtgagccaccgcgcccggccggtgttactttctgagatgcttcttacggagtgcattgttccctctgggtagtttctatattttggggagtatatatgtgtatgtataggtgtgtgtgcaggcatatctatttatctaaccttaaaatacctattctactcagacaagacatatacttttttcccacaaaagcacaaaaaatattctcaactgcattcttatatttttcttcattctccatcatttactttagtgagaatttaatgactgtaaaattaaagcataaagtaattttttcttgtgatattatgtggaaatgccactaaaccaatgttcttcactaatatggaagattttttctaagaagtagtgttttgatctgtagtaaacgataatataggagaacaacaaactcttacagttttttttggaatttaaatacatactttcatagttctaccatacattaggacattttaatgcatgagtttcttgatttttcaatattggcttccttagctaggatgaaactcatccaaaactgttcaactgttgttcaataactgttggagcatatactaatgtattgaaagtcatgaaagagagctaaagaattacatcagatctcattttcagttagctaagagaggatgattagacaattgtgactttacggtaaatttaaaaaatcacatgattaagacatgtactacaaatttgagacaaatatataaactgtcatgccaatgaaataaagatttctgtttatctcaaattaatgctttgaagactctttagatttttttattattattattttgagatggagtctcgctctgtcacccaggctggagtgcagtggcaccatcttggctcactgcaaccttcgcctcctgggttcaagcaattctcctgcctcagcctcccaagtagctgggactacaggcacgcaccatcacatccagctaatttttgtatttttagtagagatgacgtttcaccatgttggccaggatggtctcaatctcgacctcatgatctgcccacctctgcctctcaaagtgctgggatcacaggcgtgagccactgcgcccagcctagattcttaatgatggttagactcccaatcattcactggaggatttgtaaacacggcatcccaacttttctactttaatttatgattttaaaatatccttccaaggagttgaatttcacttcggtgtaataaagaactttcgctgcttggaaccaacgtaaaaacagaagtgaagaccttgaataataatttgttttctattattggaactcttcaaatatggactggttaatgacttggtagacattatagtagaaattcagttacctctgagttttctggtgttttttaaaatcttggtttcagaactctaatattattagatttacaaatgtgtttgttatatttagatactatttcaaatatggatgcatcattaaaatatgtaacatttactatttagcactaatgtaattttaatgtgtatatgtatagatagtttattttatatctgcctatctatctcagcacactgaacttgacaactctctgtctatccctagtagttacataattcatatgtcatttgtacccattcccttgctttgttctaaagctcttttaaaaattctctccttttctcctgtgtgtatggtgatcccttccttcacatggcttttttttttttttttttttttttttttttgagactgagtctcgctctgtcgcccaggctggagtgcagtggcacaatctcggctcactgcaacctccatctcccaggttcaagctattctcctgcctcagcctaccaagtagctggaattacaggcacatgccacaacacccagctaattttttttgtttgttttttttttagtagagatgaggtttcaccatgttggccaggctggtctcaaactcctaacctcaagtgatagcccgccctggcctcccaaagtgctgggactacaggcatgagccactgtgcccggcctcggtgcccttttagacccatgagcatgactaagacatgtaaaccttgtctgtctactacattttctgggaatagagatttctttaaaaaaatcaggaagcattagtcacataaaaacaatttatttgctgatcaccaataattcctagttattaaaaatttaatcttggggccagaagttactttaataatatgctattttaagctaccattagtgtaagttttgctgtataaagaataaagctccattaatgtaaagcttttttaagttacgtaatttaactaagtgcttgaatacttaggtcagtatcacagtttcaggatacagctttatttcctcctagctcttaagtccaaaactgtcctacgattatttgccttggaagaaatgagtccaaggaaggggcagtgagactgttctatgaggacaataatctttaaaatgattttttaaagcaaatgattaaagtgatttttaaagcatatttcctctttgttctcagttttcccaaacaaattttaggtactctgattactattcagtcatttatgtagacatagagcatttaataatacttagaacaagtgagaagaaggctccaaagtctgaaagttggactgtggggagaaccctccagcaaatacctcttggaaatggattagagtttgacatccagcattttatgtgccttaattttacaggctagaatctgctaatcagttattaatgagccataatgtctactgaaatgtagaatatactttaggtaaatcaatgtgaactcaagtgtcaaatatacttacaatgactgaaatcagagtccacaatcattgccagaaagaataatagcatctgtgtcatttgcaaatgacctagaatgactcttatcagtttgcaagttatctgaggtgtcctgttgcagttgagtgcacacacacaatatatcatcatgtcagtctttacagatttgtagaagagcctaggatgctgagagtttattaattagctgaatcctatctggagtttcaagcattcctgttaaaatttacttgggctgaagatggtctggatcacaggcaagggtcagacagaggaagactctccggtccttccgaatgccattaagtcactttatgaatttcccttaagcttttcatataaaatagaaattcaatcatcacacaatttagctttcacacatcatcttgactaagcatactttatctttctctgtgtttattgctttttatgtctttagtttaatgttaatcagtttctaactagcctaagtcaaagtaaaataagtcatagtttttaaaagttctgttcaaaagaaacctaactaacaaacgaaatgcgggcttctagtttactgttaaagaacatttctaataaacttacttgaaaccggtaaaaggtgccatcatccttgagtgtgaggacatgatctgagattggaaagaagtagccgtgggcagccattaatgttcccaaatggagcgcctccactgttttatgaaaacaaacaaagaacataaaaaagccttttaaatgtattcttttataggaatgtaacgtttttgtgtggttccttttgtcagatacagtaagttcctcttgaaagatttaatttctgacttccttgttctttgctctcgagataaacttccttgtcccttctcctaagctacctgctctgtaaacaacttctcctaccagtcccagtctgtaactcacatctcttccttatttggaaacagtcctcctttactcctggctacccattctgtaaactgcccctcccactgaaacaggtcttccagccaaaactacacttcctgcctttgccgtgccctgacatgcccaaacatgccttgtaccgaaacggacagcctctcccttcccacctaattagccatattcaattttaaacagtagccaatcgggtcagtttagattgtgtggtacgactccagccaatggggacaggacacagaagcagggactaatagcgttagggataaaaaccccttccctcctttgttcggtgtgctctcgcagtggccagaagtgcgagtggcacccttctgcagaagtaaatttgccttgctgagaaatcctttgtttgagtgctcgttttccttgcgactcccagctcttgtttctaacactttagagtacattcttggcattctgaaaacctggctttgtgctttttcttcttttttcagctctttctcacaagacactaagatggttctagttcctggtagcaactgccatgaccaacctcatccaatgacaacaagtccatgagaagataaagttaagaaacattaaaatgggaaggctcttctcaatctgtagagtatgtctccctcattttatagatgtgtgttggcccatgtgataatgttctctcacaggcagttgcatttggcatttatagcactttaaacttttaaaagttttcacttgcatcacctcattctcaatatcatagcaatctagtaccatcagtaatgtttctaatgatatggaccattattttgtgatgctatgagggaatgttaaggcatcaaggaccatgtatgctgcactattgaatctacagactggtgattgtaaagattgttctagcttttactattctatacagtgttctaaatatggagtaggaagagatttattggacaatgtaaacatatagtctgaaactaaggctgtaatactcatactgtttatagctgccaacaatttcttccaacaaaagggttagtaaaatttggtcaatagttattactgcgtttgtgcagagatgacataaagttttctaacttaaaggctagaaaatatgaaattatgcaaaatagttttctaccccaacaaaaaaaatatatgtacagttgtcccttggtatcctcaggggattggtttgaggacctgcacagataccaaacatcaaggatgctcaagttccccactttgccctcccacatctgtggatttttgatcatgggtggttgaatccacagatgtggaagtcataaatagagagggcctactgtatgtagaaaataccagaaaagttagatttatttatctgtttatgtatctttatgtataattcatttataaatttatttctgtttcttagtcaagaagctaggattcttacagcagttctaggacaacatggatctatctatatctccagccatcaaccatggggagcttttacacctcagttaagaactgagtaactaagtagctagctatggtacagcaaagcataagaatcccatccttttaccccttacacctacataaataaacaatttgttgttaaatttttatctgttttggggtactatgatgccccttgaaattgttatctagcattttgcaaacatttcaattgataacttctacctctgatctctccctgcattgttcttgccgataataaagaacaactgccaattattcttcattctttgccctggctttggaagactgttactaactgctccagccatcatctccaaactcgcagtcaagtctctctgtatagaatgttgttttttgtacagaggagcatttttttttcatcaattttgtgcgtgtgtgtgtgtgtgtgtgtgtgtgtatttccatcatttcaacatcctttcagttcaaagtcaaggccttctcaaagcatgcattgctcatagcaacatgcctacctatccttgttaaaactttagtgccagggtgtcattgtggaaagaacaagaactttggagacacccactgtcttctgttactttcattctctgtgcctcccccatctattaataaaggtcataaacctacctggcaggattgacgtgagaatgacataagcacacttgtaatgaaattggaatcatgcttccagcctagtaggtactatgtatatggtagctactgtgcttcattatttacacacaaaataatttttacttttctacaaaccactttcagagaatctacttccatacatttgccttctgctaggttgagtgaatatttccaacacaaaaaaaacataaaactttgaagtgatagatatgttaattattctgatttgatcattgcacatttcatgtattgaaatattactctgtaccctataaatatctaacaaaagttttaaaaagctaggctgagtgaggaatcctgacagtcctaagcagccacgttcatcaacatcatcttattctctttttttttgactgtctgtaaaattaaaatggtaagaggatctagaaagatagttggcccataacaaatgagcaggtggttatagtcctggttaaattctgaatccctaagtacccctgtggacgagtgaagaatatgccatcccaaaataccccagattgtttcaagttgaaaacactggatgaattgtagtttcagaaagggctagctggcctatctcttcctatatgcagcaagccataaagattcctctgggaggggtatcttgcttttgccagggcaagaaaatagctcttatcaccagagactgggagttgggggctgcaatgaacctgaataaagggctggatgcggtggctcatgcctgtaatcccagcacttcgggaggccaagacggatggatcaattgaggccaggagttcaagaccaccatggccaacctggtgaaccccgtctctactaaaaaaaataaaaaataaaaaacttagctgggcatggtggcaggcatctgtaatcccagctacttgggaggctgaggcatgagaaccacctgaattcgggaggtggaggttgtagttagcagagatcacgccactgcactccagcctgggcgacagaacaacactctatctcaaaaaattaaattaaattaaattaagaaataaacttaatcaagtaacccctactttccactagttttatgcccccaatatattccctagtgattctgctagaaaatttactgccttcagccagattttctttgttctgtcatttttttcttaaatttattattgtttgtctaaaaagtatagaagtgtcttgctttggccatttcttcagacttcacactcttgtgaagatccccatgtacatgtaaaactaataaaatgtgtatgattttctctattaatctgcctggtatccacctggtctccagatccacagaagagcttaggggggttgcagatgatctctgacttccttacacctgttagggaatatagggtggggcaacatgtaacatcctttgtaggtggcccatctgtcttcgtatagccatctttattattttagtcccagcagtctgtggcctgggaagatagtgttagcacactttcccggaagaaaaattaagttacggcacataaggaaatctgcggagtatagatacaagaagggaaaactgagatgcccaggaagatagacagtaagaggagcttctgagttctaagcataggaaagagtgtgactaaaaccaagccaaggaacaacaaaaagcaattgggtgttaaagtgttgatgaggattagaaaaatagagtgaaagtaaatatagagatgctacaaaaaagaaaaacagaagtgagtgatcataagactattcttgactcctgcatctcattaactactaatttacaagttatatacttatagagtgcaaagtgtatgttggcaggttcttcttcatgtaatactaccataattagtcattaataaatgcttgcaaatgagtatgagtgaattagtaaaattctccttccttttttgaggtacaatattttcatttgatttgatgatatgcattctcattttacttctcttctgagtgatacttatgttccataattttacaattaaggaaaatttgttttgatacttttgcatcatgtcatgaatttagtagaaatatactggtggtgatacaggtaagacctagatttaatttctatgtgagtcacacacatttcatatgtcaaggtgaaatcaaaccttttgacttaatagttaagaggactgatcttctcacaatgcttacaaatggttttaagatttttggtcaaatagtaatctagaggtactgaaataataatagatattttgtgttcattacaggatctccagaaaatatagctccagagcaggataaatgcctagatgaaaaatcagaaagttggggtgaattttttgcttcatttaggatgacaagtttagcactcagcatatccatggcaaaagtagcaagtgaatcaatatttgctaaatcaatgaacaaggacatttatgagtaaatgacacaccaagaatattaaaaacctaacactgcatagaaaaacaccaggctaattattgtgtgttataagctgttgaggtggggctattgtagctattttgttgtgagaaaatataatagtgatattaacaagataaatgccagtaagaatggacttggggcagtattctcaagacagacttgtttattgttagggacaaacatggtgccacagttccctgtggtcccactgctccgaaatcttagcaccatcttaatctaataagaatccataagaccgctgacaatcttggaacaaagtgttgaaagagtttactgagtaatctgtcaagatcactctcccaataacggcacaccagatggcccagcagcatcacgcttcacggcaaaataatcgctaattaatcttctcgtacatgtgttattctcttcacccacacagctaaagttcaacaataaacctactaaaaaattccagcttatttttttgtttggatattcaagccatgagcaagctgagaaacaaaaatcaatctccaaacacctctgattaagtgaacagcctagaacagctttgttaagcctgataccaacataggatgatttcaccccaaactctaaaggaatggtattatcaacatcctcggatagcgaagagaattctccacagcataatttgcttttgaccacaacgatttcaaaaagttaacaggatgaaaaccacagtataaaagaggcttgtggaactccaggggtgcaatcggttagctcacggtgcttataaaagaggcttgagtacttgagtgtaaagtactctatatttacaatgtaattttaaaactcagtaatatttttcttacccagaggctcaacttcttgcagcctcctcttcttttaaatacagctcataattttgcaacgattaataaaatgcctctgagtcaagaaagtaatttaaaaacttcactgaatcctgtatttttatcactatcatgttatttactcttatttatgtgcatgtattaacatttttttcatttccaacacagtataagtatcagtagtgtgtggggagaaatattttaaaagaaaatctaaaaagaaaaaagatggcagctgattatattaaggaaacagagatgctaaaatgaagacaaaggtaagttacttaatgataaaataacaggtattcatcaggacaattctgagccataaaaagaagatatgttagacttgttactttctgtttaagaagacatggaagtggtcattttagaaatccttcaaaatattatgctttattttttagaactggcatttggaaaggtaagattattcatgtagaaaaatctcatatgcggaacattttattctccaacaaaaccaagtaaaaatggactattaccatatttagaaatttctgaagtaagtttattttctcaacagtaggagttagtaaaagaagtacctcagctttcatctttttaaaaaaaacatcatttgcatgtaagaaaaatcaagtgccgctttctcaacagcaatcataattcgggatagagaagtgaataataaggtgacatagaatagataagctaaaagagattctatttgggagaaataaaaacagaatcataatttatatcaacattgaggaatgcaataagaaattaatataagtaaacgctatttccaaaaaaggagcagagtacaaaggctatgccagtcccctgcctaggttcacatcccgggtccctcatttgctggctgtgtgacctgagcaagagacttggattctctgggccttggtgccctcatctgtaatcatctgtaagaagttgacaaaataataatgccaaagattagcagtaaggatccattgagataatatgcacaatgcacttaaaacacagtctaccacacagacatgctcctgagatgagagttattatcagttgatacttatgaagtgtcacattcaggagcacttaatctagtttaaggggcgatgggaaacattagtagctagtgttgctctgggtttcccagtcatgttaaacacttccaattcaactctattttaaacgccccaggtgatcaaaccagagtgttttgtgggctgaaatatgcctatgtttttccctacagcaaagaacactaacaaaatcccaaaaagaaattagggacaaacttattatatatcacagggatagccacagatttccaaaggcggcatgctccacacgctaggtttacaaaaccatactgtgaataccagatgccaatgagagacctgcctgctttagaggaggactgatgtgaggacaccctgaacctgacagtagaagaataacagggacagagagagcacggggacagcaatcagaatgggagatgaattcttagggaagcataatatttgcctaggactaaaaaaagaaaatcgacattaaaataataaagcaattggcagtgagagcaacagataatcataagtcaacgatcttttttacacacacagagtagaccagtctagatgtctaatggcagttatgacatcttaggcattctgcatagatgaaaaatcatgctgaaatttgaaaaaatgatccatgtaatactggtgtgaataactggtttcagatctacattatacagcctatatgatattagcatgttcattccccagatttagataggtagttccatcagccaatcctttaacaagattctgttatattatatgtgtgtgtgtgtgtgtgtgtgtatatatatatatatatatatatatatatatatatatatatatatatatatgttaggtgcatagaatagtattcagatgagataaaaatcatgcttacttcatctaagtacagtgtgaggaaaccatcacaatggcaagggccagggcagtaataaattacagtggaaaacaacattccatctaaaattcagtatacattctgcaaaatttccattagttaatctggctgaatgagctggaagaaagtagggcactgaattaactttttagtaggcagaggagtttctacagcatgtatttcttcaaatcagagagagcacacactgccaaacaagcacatgtggaaatcatgggaaaaaaaggctcaactgcaagtcatggggcttaaattctaatcctagtgcctgtaactgcatgtcaggagtaagtcacttcctttcttttgttttgagatggagtctcactttgtcaccagtctggagtgcagtggcgcgatcttcgctcactgcaacctccgccttccaggttcaagcgattctcctgcctccgcctctcaagtagctgggactacaggcatgcgccaccacgcccggctaatttttgtattttagtagagacagggtttcaccatgttgggcaggatggtctctatctcttgacctcgtgatctgcctgcctcggccttcccaagcattgggattacaggcgtgtgccacgcatccagccaagtcacttcctttcttagagctggcatctgtaaatgcagcggggatcactaaagactttttagttctgagtccatgacaagatgtgcagtcaaaacactagctagaagttgtggcagagcagccgccatccttatttttgcctccttgtgtcaaagggaaatggatttttctttatttctcagacattcttgccattgcccatgtcccaatactctaacacgaaagagaaaaatagcccaatacgaaatataaaagctgattttaatttcagttgcttataactcaatcctgatgattctcaagggctgctatagtatagagtttttgtacacagagcaaatgaatgcttattccaaataggaactggttttatgagtgtgttctatttacacattttcaaaaactagttgtaaaaacgcacacatgtcttgggattagccaataacacatcccatgtgccaaaatatcctgaatgcattttgtttgaaaatcaaatatcactcctaaggaataagcaatatagtcttctcataatacctgttaatggtatctcttttaaaaatcactattccttaatatttgaaccataatgaatgataagtctaatttcaaagccacaggcttggtcactgaaacagtcacagtttttatgaaatttcaaaacaaaatcagtggaatgcacttttatctgtattttgcagaaacaaatgcttgaattgagaaaagtgtgtaggacgtcaggactgatgtttgcaacttttgaataatctttacagcaaagtatcattttaaaaatcctagtttataaaagcacatgtatttatcaatttttatttttaaaatctctgtgtgtatatgttggtgtatgagttttagtaactaaaataatctgaaaataagaattttagattttagaatacctaaaatctaatacacaagctttccatgaacctactggatagagatcatctttctcaaaattagtttggaaactagatatgggtaaatttgttaaataagatgtattaaaacattttttctgtttgctgttttaaaaccagcacagtctttcataaacaatttgattgtaattttaaataccacaattaaaattataactactgcctaacaataacaatgaggcaggttcagaatccataatgagtaaattcagatgagttatttaaagtattaacaactcccctcaaaaatccccccctcttttcttcaccattctgcttgctaatttcactattttttgtaattagccagaatttaaacatcagatgtttttaaagaattaaaatcaggctgggcatggtggctcacacctgtaatcccagcattttgggaggccaaactgagaggattgcttgagactaggagttcgagaccagcctggacatcatagtgagactccatctctacaaaaagtttcttaaaaaattagcagggcatggtggtgcacacctgtggtcccaggtacttgggaggctgaggtgggagaattgcttgagcccaggaatttgaggttgccattagccatgatcatgccactgcactgggtgacagagtaagaccccctctttaaaaaacaaaaattaaaaaagaattaaaatcaattagcctccaagaaaatatggtttcataaggttcttttaataaagtacatagtgagacagctttatttccagaattcaaataaattctaggggaggtgggggactgggacaggctggtcaatgggtacaaaattacacttaggcaggaagaataagttttggtgctctattacacagtagggtgactatagcaaataacaatgtagtgtatatttcaggatagctagaagaggagattttgaatgccgttaccgcaaagacatgataaatgtttaaagtgatggatacggtaattgccctgatttgttcattatattatatatacatgcattgaaacatcacatcataccttataaatatatacaactataaggtgccaattataaataggaaaataaattctagatgctgtaggtgatattaacaagaagaaatgtctggagcctcagtggatcagtaatcttggtggacaacacacacatgccccctggtgggaagagtactgcattatatggggcaatggttatgaggctggcctttgagccagactgccctggccccgttgcatcttagcagttctttagtcttcaaaattcaaatttttaccattttcattatgtaataagctttcctataaatgtgatcatcattcttagaacacgtatcttcagactggcttctctcctaaattcctgtatggtattctgaacagcctttgtgacatctccacgtgaatattgaataaacatctcaaattcatcatgtcaaaattgaattgttggctttcatctgaaacccactcttctcgcagttcttctcacctgagttaatatcagtgactttcattccactgctcggaccaaaaagcttggatcgtctgatgtctttctcccattcaccgactccagtccagaagcaccttctgatgatcctgttttgctgtatgttcttagaatctgccctcttatcagccacccacatccaccacctccaccaccccagtccaacctcatatcatcctgtggctgagtcactgcaacaacattcaaactaatttcattcacactttgccctttgctatgatgattatcttaaaacatatattagatcaagtcgctcctgtgcaagccctcaacaatttcccctatttctcaggatcgaaataaaattccttgtcataggctttacaagatcttatatgatctggccaccccagttacttctctgtcttcctttcctatttccttgcccatctttacatatcctcctctagttcacagacctccttgttgctcctcaaacataccaagcatgcgcaggccttaggctttgctaggctctctgcctggaatgctcagaacccttcctccagagagcagaacaccccacttccttccttcagttggattctagccaaagccactacatcagagacaccagccctgactacactggtgtagaagaccgcgtatcttttagttggctttcataaaaaccatttttatttagtactcatcaccacttaccatataacatatttacctatttttttattgattattatcttgtctagtgaatattttaagctctaggtaagtatggacatttttgtctgtttgcttggttggttttagtggtttgtttgcttgatctactctctgacagtgacttaatttctgagatattgcaaccaactaaaaaatatgagagcggaaatggataaaaggatcttacattagttcatagcacaaattcttagaaataaaataggggagccaaaagacgcacatattttttaagtgttgctattttatttatttatttatttttttgagacggagtctgtgttgcccaggctggagtgcattggcgtgatctgggctcattgcaaccacccctccctggttcaagtgattctctggcctcagcctcctgagtagctaggattacaggcacgtgccaccaagcctggctaatttttataattttagtagagactgggtttcaccatgttggccaggctggtctcaaactcctgacctcaggtgatccgcctgcctcagtctcccaaagtgctgggattacaggcattagccaccatgcccaggctatgtatgtctatgttttttaaacgtaatattgttccatctccagatggcatctggagatggcattattagcaataatacatatatagtataacatacatatatattatatatatataatttaaattctcaccaaaagggtataaatgtgttggtatccctgtaaagtagttaaccacttggaattattatttattttctcgttcttcatttgctgggaagaaatggcattttgctttaatttgacttaactggagttatattgaattttagctaaaatgcacagtcttttaatacacagtatgagtgaaagaaaagacatttcaagttgacagggaaggtttcacaaaagggtaggttagactaggaatggaaggattttagactgttggtcaagagggaggtccttcaatttctccccagttctcctaaaaatgctctcttttcttattttctcacctttcaattttgatttgtttcctaggcttatcttatgtaattaattaataaaaatgcattccctttttatttttcaaattctttgctccattatttactcataccaggttttattaatttaccctattagacttcatttcttcagccattcacctgtcatccatccacccatctgctatccactcatccaccatccattcacccatctgctgtccatctaacagataattattcactgtctgcttggttttaggtgcttaactacaagccacagatataaaagtgaaggtgacactctccctctctctaccctcaagagactcacagtgacatggagtatcctgtgctttaaaaagccaaggatgggccgggtgtggtggctcacgcctgtaatcccagcattttgggaggccaaggtgggcagatcacccgaggtcaggagtttgagatgagcctggccaacatggtgaaaccccatctgtactaaaaatacaaaaattagcagggcgtggtggtgcatgcctgtagtaccagctgctcgggaggctggggcaggagaatggcttgaacccaggagacggaggttgcagtgagccaagatagggccactgcactccagactgggtgacagaacaagactctgactcaaaaaaaaaaaaaaaaaaaagccaacgatgacttctggttttaactgagacatttaaagagcttagaagctgtcactctcatcctttcgacaaaagaaaaccaaacaagctgaaaatcaactatttttcctggaccattcagagaagtaaagttgtaggacaaacctccattccaaaatctgcatagacaggctcatccagagacatgaccaagatctacttacttggagcagaagcttttggatccataaactgacagaaacatgaaaatagctcttctgacaaagaacttgagactcagtgtgaactagcttgacaataaggaactcgaggggctcatagtgttggtggggaatggagcacatgccttcatgagctacacttccagaaatcccaccagattctcatggtgaagatccaagaaagatccctcatggctctggcagaagagggaaaagtaatcattgcgaaaaatgcccagagccctctctataacaaaggcctctaccccaaaggaaagacattgtcagacattattctcaccagggaaagggcatttctccaactacagtcccctctagactttgtctctcaccgaagggaggaataaaagcaaacaacattaacaggggcagagcttctacaaaatagtttgggaaagctacagctgggaaaggaagatagtggtgggagacaggggatctatacttctggagaacacttgcaaaggtcacagctccaagggacagactctgaaatgctgagatttcattgaaatattatataattctctcattccctaacaactatccaccatacctataggctatggtataatatcagattacagctgaaagagctgttaagacacaaacattctctgaggtgaaatacttagaggagctcaaagtcacagaagaataaaaataaaagcactagaggaatttgaagcttctgtcatttataaccacagcaaacattaagcacggtccaagtactaaaccataaattagcacactaaaggcctgagttcccattacctaatacaagatgtgcagctttctttcctttctctctctcttttttttttttgagatgggagtttcactttgttgtccagctggagtgtagtagtgtgatcatggctcattgcagcctcgacctcccaggctcaagcaatcctcccaactcagccttccaagtagctgagaccacaggcacgtgcaaccacaccgggctaattttttttatttgcggagatggggtctcaccacattgcccagtctggtcttgaactcctgggcttaagctatctgcctgccttggcctaccaaagtgctgggattataggcatgagccaccctacccagccatgttcagctttgaatgtaaaattacaaggcaggcaaaaaagtaagaaaaacacagtgtgaagaggcaaaacaacaatgagaaccaaattcgaatatgacacagaaattggaattatcagacaggaagtttaaattgtaattaatatgttagggactctaatagaaaaagtgcaaaacatggaagagtagatgaataatgtaagcagaaagattctaagaaagatattcgaagaaagaatcaaaatgaaatgttagaaataatactaaaaaagaaataaagaatatcttgctgggctcattagcaggctacacaactctaaggaaagaatcagtgagcttgaagattaaccaacagaaacctcaaaaactgaaattcgaagaaaaaaataacaaggaaaacaaaaagaacaacaataacaaaagcatccaaaaactgtgggacaatatctaaaagtgtagcataacataattggaataccaggaggagagcaaagacagtgcagcagaagaaatattgaaatgataatggctgaagactctccaaaattaataacaaatgccacactacactcagagagaaagaaaagtaaataacaaaaaaatctaaatctacacatatcttattctaactgcagaaaatcaaagaaaataatcttgaaaaaagcgagaaaaatatccttacctatagagaaacaaaaatatgaatgacagtgcgcttctcatcagaaactatgtgggcaaaaaagagaatacagtgaaatatgtaaagtgttgaaggaagaaaacccactaacctagaattttacatcaagtgaaattacccttcaaaagtagaggagaaataaatattttctcagacaaacaactgaaagaatacattactagtgggcttgccttgccagaaaggttacaaagaagttcttcacagagaacaaataataatatagaccagaaacttctacatacataaagaaagaaagaacatcagggaagaaataaaggtaaaacaaaatctcttatttttcttattcttagtttatctaaaatataactatttgtttaaaataatagtaacagtattaggtgattataaaatatggataagtgaaatgaacaacagcagtgtcgtaaaggaagaaagggatgaattgggaatattctgttacaaggtaccttcatggtatatgaaacagtatagtgtaatttgaacatggagttagattaattaaaatgtatatcgtaaactctagaacagctgctaaaaactttaacaaataagtacaattgatatgctaagagaagagacaaaatggaattatttaaactgctcaattaaaaccagagttggctgaaaaagaaggggggaaaagacacaaatgaacaaatgcaatggagaaaatgcatgttttgtccaaatgcattgcaatacaatgaacaaaatacatacaaatatgtaagaagaatccacatatatcaataatcaccttaaatataatggtctaaatacaccaactaaaaagcagagattatctaagtggattacaaggaaaaagacctgactatacatgtatataataaactaattttaaatataaagactcatatatgttaaaaggggggaaaagagataccatgttcacactaatcaaaatcttttgaaatagtatctaatacagaagcaatattaagtttaggcaaggcagacttcataacaagcaagtttatcagggataatggaaagcattatctaaagagatcaattcttcaacaacaataaattgattatgaagatcacttttctattacaatcctaaatgtgtaagcacttaacaacagaatgttaaaatacataaggcaaaactagagagaactgaaaggaaaaataaactcattattacagttacaaacttcaacaccactttttcattaattgacagaccaaataagcagcagaaaatcaagcagtcagaatatagttgacctgaaaagtactatcaatatataaattgatagtatatcaatgatataaattgacatttatataatgttctatccaacaacagcagagtaaattattctaaagcatacatgaaatattcatcaagatcaaacacatcttgtgtcataaaatagatcttaaatctaaaagaacagaaatcatacaaagtatattctcagatgcaaaggaattaaactagaaatcaataaaagaaaggtagttggaaagtctccaactatttggaaattaaacaacataatctttagtaacccataggtcaaagaaaatgtctaaagagaaactgaaaattatttttaactaaattaatatgtaaatgcagttgatcaaaacaggtggactgcagcaaaggcagtggttaaagggaattcatatcattattaagcattaatgcatttattacaagaaagatacaaaattaataacctaagattatacgctagcaatattagaacctagagaaagaagagcaatttaaacctagagtaatcagaacaaaagaaataataaaattacatcagaaatcaataaaattgagaacaggaaaacaacagagaaaaatcaacaaaattaaaagctggttcttgtaaaaggtcaacaaaattgacaaatctctgcccaggcaaaccgtgtgaaaaagaaagaagactcaaattaccaatatcagaaatcagagagtggtcatcattaaggatccatagaattaaaagataataaaggaacactatgagcaatactatgcccacaaatttgataacttagataaaaaatgaacaaattacttcaaagacacaaaccatcaaaacttgcataagatgaaatgggtagcctgaatagctctatttctagtaaattattgattgaatcaataattaataacttccccctcaaaaaagcaatgggcctagataattttactggtgaattctatcaaacatttagggaagagatgattccatttctccacaatgtctaccagaaaattaaagcacaggtatcccttcctagctaattgtaaagccagcattaacttaatactaaagtcagataaatacaggaaagaaaaacgacagaccattttctcttattgacatagaaacaaaagtccttaacatattatcaaatggaatttaacagttaataaaaagaattatacaccacaaccaaagggacttattgcacatatgcaagcctgatacagcatttgaaaatcaattaatgtaattcaccataggacaagctaaaggtgaaaacttatacgatcatatcaatttgtgacaagaaatcattagacagaatccaaaacttatccatgtaaaagaaaaaaaaactcttagcaatctaggatcagaggagaactttctcaacttgatgaaaacatctacaaaaatactacagctaacatcattactaatggtagaaactggacagtttctctctaacatcagaaataaggcaagagtgtcctctttcacacttcatttcaacattgtattggaaactctagctagttcaataaggcaaagaaaaaatgttatacacattggaaaagaagaaatagttaaaattgcctttgtttgcagatgattataattgtctacgtagaaaatcccaaagaatctacaaaaacactcctgaaatttaaaaggtagaatatcaagtttataggatacaagctccataaataaaagttaattgctctcttatttaccaaaaatcaacaattggaacttgaatttaacaatgccattcacaatagcagcaaaattggaaatagtgataaatctaacaaaatatatacaaaatctgtgagaaaaactacataacactaattaaagaaataaaagatttaaaaatggagagagtccatgttcatggactggaatgctcaatgttttaaagatgccaattcatcacaactgaaaaactgaactaaagattcaatgctataccagtcaaaatcacagaaagctattttaaagatactgaaaaaatgactgtggagtgcatataaaaggaaaaagatccagaataaccgacataataatgaaggataaaaacaaagttggctttaggaggccgaggcgggcggatcacaaggtcaggagatctagaccatcctggttaacacggtgaaaccctgtctctactaaaaatacaaaaaattagccagacatggtggtgggcgcctgtagtctcagctacttgggagtctgtggcaggagaatggcatgaacctgggaggcggagcttgcagtgagccgagatcatgccactgcactccagcctgggcggcagagcaagactctgtctcaaaaaaaaaaaaaaaaaaaaaaaaaaaaaaaaccgatttggaatatccacactgatttcaaaacttagtttcaggctgtagtaatcaagacagtgagtactggaaaaagaacagagaaatatataagtaaaacagaaaagagagtccaggtatagacccacagagtcaattgattttagacaaaggagcagaaacaattcagtagaaaaagaatagtgtttttcatccttatttgttgttttaacacaacacaaccaattgttatgtaaaaaagaaaggcctgacactacacgcaggtcttattagttttcacaataattaactcaaattgtattatagacctaaatgcaaaatgcaaaatcagaaacctactagaagaaaacataggagggaatctgtctgaacttgtagcccacgatgggttgtcaggtatagcactaaaatcactagtgcaacatgaccttacataccaggatgagtttgtagagatagcactaaaatttagaattaccagtattacaaaatgaacctttatacatacgtatttcattcttaccagaacagtggaaacacttgcacaaagctaacgcaattgtcttcatttcacttgatgcacacactctctacctttggctccctgatgagtaagcaagggctgggaacaaaagcaacaatgggttgccctatctgcctttcctgtggaagagaagcaggagccaactccaagagttcccaatggccaaagataaaaccatttcagaaaaaaaaaaattgaattaagtaattttatattttgagattatatcccaaagtaccaaaaacaaaaaacaaaaaaacaaaaaaaaaacccactatgggttcatgctgatgtaaataaataattgaataaataaatagaaacatcttccctgccaagaattccaaataatttacgtagatactttagcctgaatgaggtggagcataacactccactccttcagtgggggccacatttagtacatttagtaactgtttttccaaaaagtatacaatgacaaagggaaaaatatgagtcactttacaatatattttacatcagcagtgatgtcatgtttatagtgtacacacttaaatgtatattattaactgaaagaagccactctaaaaagcctatggagtgtatgactccatttacatgacactctgaaaaaggtaaaaagagatggtaaaaggatccatggttttctgacgtgatgacaacagcactttccctttgtgattttcctcccccaaacccataacctcagactaatcaggagaaaaaaaaaaacgttaaacaaatcctaattcaggggcattttacaaaataaccaagtagtactcctcaaaacggttaaggccgtcaaaaacaagaaaagtttgagaaactgtcatagtctagaggaccagaagaggtgtgatggttgataataagtgtcaacttgattggattgaaggatgcaaagtattgttcctgcgtgcgtctgtgagggtgttgccagaggagattaacatttgaggcagtggactggcagaggcagaccaccctcaatctgggtgggcaccatccaatcggctgctagtgctgctaggaaaagcaggtggaagaaggtggaagagcagacttgctgagtcttccggcctccatctttctcccacgctggatgcttcctgccctcgaacctcagactccaggttcttcagcttttggactcttggacttacaccagtgctttgccaggggctctcaggtcttcggccacacactgaaggctgcactgtcagcttccctccttttgaggctttgtgactccgactgagccactactggcttccttgctcctcaccttgcagatggcctatcatgggacttcaccttgtgaccgtgtgagtcaattctccttaataaactccccttcacatatacatctttctattagtcctgtccctctagagaaccctggctaatacaagaggcatgacaactaaatctaatgtgatgtcttggatggaaccctgggacaggaaaaataaaggaaatcagaaagtattgacttcagttaatattaatgtatgttaacttctttaatattaactgacttagctaatattaaccagtaccaatattggttcattggttgtgacaagtatatcgtactaatgtaagatgtccaataatgagggaaactggggggtgggatatatagaaactttttgtactattttgtgatttttctgtaaatctaaacctattctaaaataagattttttaagagcaaattacaattaaaaaatcactctactgcataacctgtagtgaaggtctgtgcagcatctcaaagaaacacataggatgaagaagccagagacgattttacagacccagtgacccttcttctcacggagacttgaagaattagtaggagtccaatgaggaagaaggcactgaaaggcagaagaaggcacaaaaaggcccctaggcatgtggtggctgggcacccctgataaagtgcagttcatctggcagaactacaagttgagaaagcctcaggccggagaaggatgcaaggctgtgtccttcctgaaagtccttattggcatttgttcctctgagaaggcgaaatctttgcacaggtttaagtgggaaagtggcaaaacaataagagcctcattcatttctgctgtgttccagatacgatgtcagatttttcagcttcgttatctttgatcattacaaaggatccttgtatttacaaggttagagtttgttctttaggagatcattctccaaatctggagactagattgaaaggtagcaaggctggaggctctttgcggaagtaactgacacatcttttcatcacttcttgtctgttggcttttgtcagtgtgcttgaaaataatttcagctgtttcatgtcatggaattagatatgctttgattacagtttctgctttcttgccttcacccaactcactccttagtgatgctctgcaggacgacttttattctttctctataaagaaactgctcctctgaactcaccctgcccaagccctgcctttacattatgtatacgagttcttccagtcaaactggatcacttagtgacttggagcaggtggcactctcctccgtacctctcctttaacatttatgtatatgtcaaaaagcttccttcttgcttttcttcactgggtataattctgtccaattccctgggtccacccaaatacagccctccctcatgagaccttttctgacctcctagagcaatctatccctccaatgagccctaaatgcctgatatcttttactgtagctaattgtgtgctgttattagcctttcctatacttttcataaagatcttgaaagacaggcaggcacgctgcttaaactctgtttgcctggccgtgcacactttacacctggtataagcagaacgtatcatttgaactgaaaataaagtaagaaaaagtaaatttaactttaaaataaaacacttatttcagagtggttctttgatacttataataaatgctcactttgctttgatactggatatgactaaagtttactttatttggacggatatattacctttgactgctgaattaaaagaatcaatgccttgatttaagctgtgcagctaacagtagctctgagaataaacaagaggaaaatacagccatgtatctcatgcatgagagatgcatcttcggtgatttcatcattgtgcgaacttcatggagtatacttacacaaacctagatggcacagcctactacacacctagactatatggtatagcctattgctccaaggctacaaagctgtgcagcatgtgactgtaccgaatactgtaggcaactgtaacacaatggtatttgcatatctcaacatatctaaacatagaaaatgcaatgcattactctataccattatgatagctacagtatcactaggcactaggaaactttcagctccattataatctcatgggaccattgtcatacatgctgtcctttgctgaccgaaacgttgttatgggatatatgactatatataatttttatgtaagaattttacatttattttttattttaaaaaggacacttcaccataacatcttgataatttattaaattgcaaatacataagatgataaaaaatttcaaatgtcatcttctctatttttaattaatgcctagtgagagcataaacattatttcaacctaccagtccatattttaaaatacaagttcacgcttaaatacatttggagtgaaaaatgtctaaaacatcctaggcatggtggctcacgcctgtaatcccagcactttgggaggctgaggtgggtggttcacctgaggtcaggagtttgagaccagcctggccaacatggtgaaacctcatctctactaaaaatacaaaaattagccaggtgtggtggcgtgtgcctgcagtcccagcctctatggaggctgtggcttgagcctgggaggtgaagattgcagtgagccgagatcacatcacagccctcctgcctgggtgaaagagtgagtgagactccatcccccaacaccaaaaaaaaaaaagtctaaaatattgatttgcttttcttcttcttcctcttcttcttctttttttttttttttttgttgttgttgttgttggggttttttttgagacagggtcttgctttgtcacccaggctggagttcagtggtacaatcatggctcacttcagtctcaacctcctgggctcaagccatcctctcacctcagcctcccaagtagctgggtctacaggggcacagcaccatgcccagctaatttttgtattttttgtagacatagggtttcaccatgtcacaggctggtcttgaagtcctgagctcaagtgatcttcccgcctcagccttccaaagtgctaggattacaggcgtgagccactgtgcctgggctgttctttttttttttttttttttttcccagaagtctttgaatccaactttaaaagccaagtgaaaacctcagaaaacaaatgaagcctgagatgagactcatggaacttgattccttacccgacctatttagaagacattccttaacctatgtacagtcacttaattctgcccatgaaaagcaatgttgcatttcctcacagctgaaaatacttttaaaagaaagtaactataataaattctgaaagtggaaacttaatttataaaagcaatgaagcttgagacctaactttgtgggaaaacaatgcaggtatcttttttcacattaaaaatgttactaatgaactttagtctgattacaaagctatctgaaggaaatagcatgccaagtgcaattatgaatataggtaagttggataccagaatctgttttaattaagtaaaattatgaaagtgggataaaaggacaaaagctctgaaaaacaaatggttgattccagaaatttttattcagataatgaataagacagctaattatttggatcatttagttattgattaaaatggtaaaagtaataaaaattatctgtaaagtaatgtatataaatatagccaattagaaaaaaaaagagcaaagttgctggaagaaataatggcatcaaaaaaattaaaatatcaccatttccttcagctaaagattatgcaatggtagaaaaacatactataacagagaaatgagtttcatatcaatattttacttccttttttaatctcctctgccatctcctcctcatcagataatccaaagtgatgtcatgcaggggtgacagtttgtacatatggatgaataacatcaatgtatccaccttatataaaataatctattatcagggagctcaatttagctttattggggtctttagaaatttactattaatatgtgcatgtttattttcacttacttcaaatgaaaattgctttttcaaactattgagatgccaaaatataccagatatagaccagaaatgtgtagcaatttgctacctattgtcatactctagctaactttaaatttctaacaacccctgtgaggtctacaatggcaatgcgcaatggggaatgcaaaatggcttaaatggcatttggcattgaactggtacctttctgaggacaacagtttatagggggaagaacagtttcaaggacattaagaggcagcagagagttgcaaattcagaagttttatcaacattgattctgagattccacattctatctttaattgatgattatattgtccaaaacttttcactttatgcaagctcagagagaaaaagagagaagaaagtgagtaagggagggaagaaggcagagaggaaggaagggaggaaggaaaataaaaagagagagaagaaagagagagagagaagaaaagaatctgcccttaattttgctaccttcctaagtgcgaccttattgcaatttgctccccttccttttgagttcatgcctcatgaaagagtattacacacgtatgttccttactttcaactcccaaccccttccttagctcaccgtacttgtcttcttccggcagaagtctactgaatctgttctctcaaaggtcaccaatgacttcctagtagaaaagttctaccacttccccactctctcccagtcttctctgcttaagctctggtgaatctcccttcctggagccctctatgtggctgctgtcacgctctgtctactctgctatctttctctccggctcctgacctagttttccctaccttctgactcctgctctctatggttaaaagtctcttaaaaatctatctctgctgtagcttcccctttcctttgtttctctctatattctttcttccttggcaagctcatctaatttaaaaggtctgcttaccaaatgtgtacctcagtcatcatttattcaatgtaggagaacaaaacccactagacaaggtgccagctctgtctataggaagtcagtagtctatttaataggtgaaactggcaaatcaacagacacttaactacacagtctaataatttcaacagggaaaaaatgcagtgtgttctggaaaaacattaaaggaagatccaatctaatcttgggagctcagggagatttcctggaggagttgatatttaattcaagttctaagtaaaaagacaggagtatgaagcaagagaaggttccaagcaaagaaagcagcatatgcaaattattgtgattagggatataatgtcatttgagaaaccactatcagttgggtggcttgaagacacagcatgggttgaaaagtgatctgagcagatgcaatgatataaatatggctatatcaaaaagggttttaaatataagctaaaacgcttgtttgaacattatcctgaggaaaatggggggatctattagttattgaacttcagaagagacatgattagatctgagttttggaaagatcattatagatgcagtgaaatgaattgactggtgtgggaaaagaggaaaaggaatatgaggtagaaaacagtggcagttcctagtgagatgtgttgatggttggaatgaggagtgagatagtgggagtagagagaggtggacagatctgatatttaggaggcaaagtctgcacagatttggggatagaagaatttcgtccatttagatttgttcagtctatgagatgcccatgaaacgtccaagtagagatctatagcagacaagacagttggccaggagctcagaagagagtccagaggtatatttgtagtggttatcataccaacaatgggcaaaataaggaagtgcataaactgtgaagagccaagaaataagaaatctcatgcctgggtctccaaaaccctgaaagttaagaggcaaatagagaaatctgtgaaaggtactaagatggagggtgatgaagttatggcacaacaaagaagagagtaatggaagctaaaaaggagtgaaaaatgctgcagtgaggccaaattgaggactgagaagtaatcattgaattttgcaacaagaaaaatatcagtgatcacagcaaataaggtttcagtgtataagtgggggatacacaccagattccagtgaactgagaaataaacttgagagagaggaattaagagacagtaaatgcagctgagtttgtgaaaataggagagacataggagaatagctagcgtggaccatgaatcaatgtaagagtgtattatgatgggagagaactgtggtgagtaagcctatacagatatggctggttaagatataaaagtgaaatataagaatgaaatgttgggcatggtggcccacgcctgtaatcccagcactttgggaggccgaagcgggtggatcacttgaagccaggagtttggggctgcagtgagctgtgattgtgccactgtacttcagcctaggttatagagtgagaccctgtctcaaaatgaaaataaaaataaaaagggatgaaacaacactgaggtggtgagagaggatggggtaagaagcacagggaagctcaacacagacagcaagagaagcaagaatgggtgcacacagagtcaaagtgtatttgtaaagcagagcgagttaaaacattagagacatttcctccttgctttctatttaccctgaaagattatggtctgatattgagaatgactgagaatgtagcatgccagtagaggaagtggagaaagctttgaataatcatcccactaaataggagatcgatccgattacagaaaggattgccaggaagtcaggaaggcctgattgaggttgggaaccatgacatcttggtagcaataatttataggattgagtgacttttcaacagcgacgtgcagaatttcagatagacacgggaatacaacaagattgatccaggatcagaaactctcttggtggatgcactgggaaaccaagactggaggaagttgagagcatttgtgagttgtagtgtctgatcgtttttgctgttggtgtaatgatttctttaatgtcactcttgcctgtaagaggggcagtgatgtgtttattaatcatcactgtacctccagtgcaaggatggggacattttgtgtgtgcattaacaatttattaaacgcatcacagtcctacctgcaaacctgatttatttggttactattttatcaccctatcatattgcagagattttttaccttgtgaccaaccaaaagtgtattttattcgaacttaaggcaaaacattttgacatcagagatgaagagacatcaaatctattttttaaagaggtcatgaaaagaacatccctttgtctttcccgacactccatttatattacatacattttcctttcggacacttgttctgttctgttctcttgggtaagtgtcatgtgtggtttaaactcagggctcttccttctttgtggaactttatcagatacgttgatggtgactaattagatgtttcaacttcaaacaagttaatgtttcaacttcaagttgaaaagattattgcattgaactgtactctttacctttgcttctctcaagaaaatgtttatggccctattttcttattctcatatgtttgcttcttaactgtttaatgatgtcactgcctctcaatcaactctctcctaggcctctactgtcctcattaattgcagaatataattccacagaagcccctttatgatgctggagaattttcacataatttgtatgatagagtctaagtaatacctatgtttctgtcccactctttactttgaaattttgcacctccctgccagtttgcttgcatctttttctctgactttgcatgcttgaaatcgattatttggtaaaatgcctcaccttccaggtacagaagtgtccccaaccacacaacattatttgacttttagtagtagttccttaagacatgtccccagtatttccttacagcaagtgctcacgtaaagcagacgaatatttgacaaaatctgcaggagacacaggtggagagtgaacgaggctcacaagtggctgccatcagcccttccttcccggcagcagtgtggaggggccgtcagctgccagacacttcacactccactgtttgctcccgtttctcttgtaaagggctgggtgggacagcaggggtgtgatgacatgattcccagtgacagaaatcttggctcctgttggctctaagctggacagacaagaaactggataaaaattcttttaataatttgtttccgtttacagtaccacgtcagtgaccacaaatttattaggctgctcttggacatctgttagtaaatcgggcacattcatcaaatgtgaggccccagatgggagctggaaagcattaataaaatgcagccaatgttcacgaaaaggcaaggcagtggaaatttacctattgtagagggaggaggtgctctctgtgcttaatagctcttcgtcgtatacccgactgagcagaaatatctcagtggagcaattctgggatttatgtgatgcaaccacctaccatctttgtcttatctcttacttttcacaggcatgaacctgtcattctagaaacactaacctactcattctccctaaactatataaaaaaaaagtctggatatgctatttttctaagctggaagtaaatgatccgaccttgaattgtgattaaaaaaagattatttgcaggatgtcatgacactttacaatggcttaaatttttgaaaaacttaggaaaaaaaaatcaaagtataaccgaaagcagttgtttcagttaatatgacattattttaggtttagagataaatttccagcagaagaatttgtctctttatgatttgtatgaattcttgctatggccttgctgttcctctgcttgggttttctctttatgatttgtacgaattcttgttatggccttgctgttcctttgcttgagttttccagaacgccacaccatttcagtccacaaataatggtttgtttctaagaggagctactatttgctcataaaactcattttctatggaataaaagcagcctgtttaggctgattcagaacctgtagaacattttcctgtagttgggcaaccgctctccttgcttttacttagagaaaaaattgattaatcgaaacctatggataatagctttgggaagtttcattttctatttgtaactaaacattttctatgtcatgaagggtcaagggaacctagggtttttcactttaaggtaaacctccagttacagcttaaactatgaacgtggaaatgtctcctatattgttaagtaaaatatgcaagataaaacaatctatttttttaatgttaatattctctgttaagtgcattcaattcaacaatgtttactggttacccaacatgtgtgaaacactatgtaggggttagggacaacacaaagaacaaagtccttctacttataaagctcatattctagtgaatatgtggctcagacttcgggaaatgtcctaagtcagaccatgatgtgtcagtgtgggacagcccatgcccctgtcaacaggggtggtgtttgtcatgtcaagatatccttggaagtggtcaatcttaaattgttcttgaggtcaatctgacagtcggatatgagactttagaaagcgtggctaagagtaaaatgaagaaactgtttactctttttcttccactaggagtcacttgagcccagactctgggcctaaatatacctacaagattttagtgatattggccactgtcctgagacatgagaagagcctcagagaagtagcttctaaaagacacaaggatagatctgggctgggaaagggtcgtagttaccctgtgtgctgtgtttttcttcttctatccctggagctcaacaaaaccttgtgaaaagttagagtctgagagatcacggaggaagtctgtgaagtggtacaggctgcgtaataccccgggcacaagcagtgcccttggctagggtcaaagtgattgtgccaagaagtgggggggggggggaaaaggctgtagcaagagtatgggcttcacaggccgctgagggcaaagagacatgagatactggttcacgagaggcccgagaaaatgaccacatatggggagtaggaaagacactgagtggggctcgttccaatgataaagccagagtgggctcaggccttcaaagaagactggacagacagatgtgctagaattttagctatggctatctcagggagcttttcgtgagtgctttttattttcttctttttatttttttcatgtttcccaaattcgaaattacaaaaagcaaattagagttattgcttttaaagaatccaaaatgttttaagaaaaatgtatacattataagtaactacatgtgacatttgactcctgtccctaggcaggggctgctgaaacatctaccaaccaatatccatatccaaacatccaatatccaaacaaccaatatccaatatcccaggaagacttggcagatcagttcgtgagggccaagggttcactgatggtgctgccaaaagtaagaataaagatggggtgcacccatcacttctcacacaggaagcccatgactatccacacatacccgtgttcatggatgaaccccagcagaggaagaggtgaatgtcatgtttgctaaaacaaatgagtaagcctcaggcctttgaaaaccagacactccctcttcctacgggcattcagtagaagcaaaatgctactgatgcctggcagatcccttccaaaatttggtttaaatcaaaacagcagttattacccgaaaataacacaaatcacaatctgagcatgtgcctcctgtgaaatggagataatcagaattcaacatggtgcgtataatgtactgtaatgggcctcaaagcccaggtattagtgagcacggcaggaagcaggaattctggataattcaagaggccccaatcacttgaatttaatataactgcaaaattaaaaaaaaaaagcattttagtctcattagacttgcagcctccctcacttaaaggggaattttcaaaatttgaaaatcgtatcagatgttacaattgaggtttttagactcattatttttaaaagggtgaccttttactgtacagcaggaacctgtcttgtgtggtttgagacaaatgacaatgaagagatggatatgttcctaggatcatatttaggctataaaacatctatcagtgcccttatcacactttttgtactgctgtagttagcatctcctatcattattagctgtgataaaagaaaatgtttcatgaaatatgacatagaaatagaataagcagcattgttctcaactgaaatacaggagggggaaaacctaactcattcctcatctgggaaataagaaataccgcattatctttaataaaagataaagggacctgacttttcagacagctcttacacaactatctatggccgcttctgggtaacagatataatcgtacatttctctgtcattttctgagtggctaccctgatgaataggcacatccttagatgatatcttctgctctaggccttattagctttatccagtgctttttacttttcttttcttttcttttcgtctattcttcttcccttcttcctttttaaggaaagttgcttatgtcttatttctttgccaaaggaaattcaagtcggcttataaaaggaacacatatatgcagaaaggaaagtgaggctctaaaaagaagaagaaagcaaagaggccagccagctactggaagaatcagacaatgccacaggacaattgtgcatcgtccatttggtctgtgtagccatgttcatttttgttttttctagtggacagtgtagaaatatcaagctctgctgtaataggagatgttcctgtgtgtaattaaacacatctccaaatgtccattgaaccctggcctcattatgtttgttcaagttctacaagataaaagacagaaattctaattagatttccagctgccttttgtattttccttaatagctgacaactctaataaacaatatatatttaaaaaaccaatcagataaaaatgagagaggtcacaaaactctgggactggcatttatagatgcatgtgctgtccagcaaaaaccaaaaatggaattaggacagacagatcacctgctggtctctaacaaacgtactgtgttggcatgatgccgacacaccaggtatgaatcccagctctgctcctcggttctgctgggagtctcaggggcttcatctgtgaagtgaaggtgacatccctcgcctggagcagtgttcatgcttttaaatcaaatgtatctgggtttgaatactggttatctctcctattcgcttcatgatctgagacttacatttttaaatatttcttcaaattttctttcttttctcttggagttcagaataatatatatcaagttctcaacatgatgttcagcacatagttgatgctcagtaaatgtgagctttcttgcccccttcctacttacaagaactaaatgaaaggacaacatccagcatggtacctggggagacccaattgattaatgctcatgtgtgatagttcttttttgctggaactgcaatatagtgatagaggtgggaagtgaaggcagccagaaactcaaacctgaaaaagcctttatcaacgggaaagatggtctgaaataatggcagacatcctgggggaaataccccctactttggcaatgaaaacttcaacgtatggccttcatgaagacctttcagtacattctaggtttggggactttgttgtgcagagcaattggataattatacaagtcaatggaaacaacagtcactcgttgcattacagaatgcagtatttaaatgcaaacgcaacaccaaaaacaaataaggtggggagtaaaagaaaagagtgtggctagcttctaggttaaataagacagttggtcccaacaggttggatgtgacgggactgcactggatggcactgatcactttgaatggcagacatcacagagcaacatgtgcagacttctcactttctgtacactagagcattcccaagaggcaagaggccaccaaaagagagattcttggtgttgttaaatgtgtaaaatatgccaggcagagtggcttacacctgtaatcccagcactttgggaggccatggcaggtggattactcgagatcaggagttcaagaccagcctggccaacatggtgaaaccccatctctactaaaatacaaaaattagcgtggtggtgtgcccttgtaatcccagctacacagggagctgagacaggagaattccttgaacccggggggcagaggttgcagtgagctgatattgcaccgctgcactccagcctgcatgatacagggagattccgtctcaaaacaaaataaaataaataaataaaataaaaataaatgtacaagataccataattttggtggctctgctgtagactgaatgtctgtatcacccccaaattcatacgggaggtgattaggtaatgagggcacagcccttatgaatggaattagtgcttttataaaagaggctccagagagctcgctctccccttctaccatgtgaggccacagcgagaagacagccatccatgaaccagaacgcagaccctcagcagacacaaaggccaccagcaccttgaccttggacttcccagtttcccaaactgtgagaaataaatctttctgttgtttgagccactcagtctattgcattctgttatagcaccctgaatgaacatagatagggtaccaacagaatataggcaaaaataaattcctcccttctaaagaaaagctcctaatacgctgaaatgaatacacaaagaaaactatagttcttgctcatctcacatgaaataagtagaactacatataagattccctgtgtacacaactaggaagctccagctgcagtagccagggtgtgggatgagagcaggtacccaaagatatgaggactttgtttgttccttaagcattatttataatataaaatgcacgtttgcaagatgaatgtttgggtaatatctattatcttgaaactaggtcaaatcaatcaatcttgttagatttatacttaatggctccaaactatgacttcttgcatattatcatcagagtgttaaatatatctcagaaacctagaatgtttttatatagtggtctactagcactggaacgataataaagcggtcatttttattgatctcctatggacatgacagcttgctcagtggacaataaaatatatattttgtaggtttataggtttgtaagggtcttaatggttatttgcaagggatattttaaatgcttctaccgcttccctctactgaagcaagattgttgtttgaaacaatttgaagagcatacagaaaagatctgtttttattgacctgtaatatacgagttgaaatacataggaaattgctctaacaaaatggagtatccagaatgcaacaggtaaatataacatcaaatccaaggaaatacattactttattccaaaagacattatgtaatgtacctttgggtcagttgggtccatgcctctcttatggttgcccgccatttatgcaaaagcagaatccaggtctgaaatagttgttcaaaaaggtgcaggacacgtatgtttattgcggcattattcacaatagcaaagacttggaaccaagccaaatgtccaacaatgatagactggattaagaaaatgtggcacatatacaccatggaatactatgcagccataaaaaatgatgagttcatgtcctttgtagggacatggatgaaattggaaatcatcattctcagtaaactatcgcaagaacaaaaaaccaaacaccgcatattctcactcataggtgggaattgaacaatgagatcacatggacacaggaaggggaatatcacactctggggactgtggtggggtggggggaggggggagggatagcattgggagatatacctaatgctagatgacgcattagtgggtgcagcgcaccagcatggcacatgtatacatatgtaactaacctgcacaatgtgcacatgtaccctaaaacttaaagtataataaaaaaaaaaaaaacaaaaaaaaaaacccaaaaaggtgcaggagtctggtgcagtggcttatacctgtaatcccagcaccttgagaggccaaggcagggagatcccttgagaccagagtttgaggccagcctgggcaacaaccccgcctctcaaaaaaaaaaaaaaaaaaaaaattaaaatcaactaactaaatgaataaatatcagctgagtgtggtgatacatgcctgtggtcccagctattcaggaagcttaagcgggaggatcacctgggcctgggaggtcaagggtgcagcgggccgtgattgtgccactgcactccagcctggacaacaggagaaagactccaattaaaaaaaaaaaaaggagcaggcacacagggtacaggttgtacctactgtgcttttatttcaaggtttttgtgtgactttagatattcacaagtttctctcctgttaattttctggttgtaaattgatgagatatctgcctggctacttcatgatattgatatgataatcaagtaaaataatttaattaaggctgggggccatggctcacgcctgtattccagcgctttgggaggctgaggagggcagatcacctgaggtcaggagtttgagaccaacttggccaacatggtgaaaccctgtctctactaaaaatacaaaaattagcggggcgtggtggctaatcccagctactcaggaggctgaggcaggagaatcacttgaacccgggaggctgaggttacagtgagccgagatcacgccactgcactctagcctgggtgacagagcaagactgactctcaaagaaaaaaaaaaatctaattaaatgatttggaaaagcataaaacactttataagtccaaaacattatcaaagataacagagacattcttttttttggagatggagtctcgctctgttgcccaggctggagtgcagtggtgccatctcagctcactgcaagctccgccttctgggttcacgccattctcctgcctcagcctcctgagtagctgggactacaggggcccaccaccgcgcccggctaatttttttttctattttcagtagagacggggtttcaccgtggtctcgatctcctgaccttgtgatccatccgcctcggcctcccaaagtgctgggattacaggcgtgagccactgcgcccggccagagacattctttactttctcagttctgatgcaccctcatgttcctagggctgtaatttcattggcagtttaactaaattcgtggaatacaaaggccatttgtaatggagttttattaaattaattaacaagatttagagcactttcttcttcagaagacttgtggcaggcttgggaggcagatgacagactctataatggtgtgcacaatggattgatttaattcattcggtgataattaagttacttgatccagttgtttgatggtgtgtaagcaaaacatctggttgatttgcctgaatcttgattttcactggtatttttacaacagatattgcttctagaggaagaaactttgcaggtatttgtcattaagtttttatcctagataaattatatttatccttaatcttattcttctatctgcattttaagccattttgtttacactgggttttgtttagataaaaaacaattcatttaaaatttctttctgttcacgttctcacatccatttaagagagcacaaactgaatcatcagttaccataaatccgatgccacttcagtgaattcccatcagtcaaaaaaacaagtgattattgagaattgattgaccgtggcacttcatttgatggctggagagggtatgtgtcctctgccattatgttgcttagattcaactgaagtgatgagaccaacatacataaaataaaaaatataagataattaaactaagcaacagataaagtagtatcaaatggaaatattctttcagctcatggcaaagaaaagccaatgggggctgaattatggaagaaaggctcatggaataggctgtatttgaagactagtataaaagttgtatgcatttctaaaaaattcaattcagttaaatgtgcttgcacatattcagagttttaaaaatttggcctacataaaaatacaattaagattctggcccacttgcatgttgattcttttaagtatcacaaaacatggtattaaaagcacttttcagaggaagggaaaaaaaaaaaaccagagaaattaatttgcccaatgcctgtaaccagtaagtgcttgaaacaggattgaagctcaagcatgtctgcaaagctcatgaccctcttcaatgccaggattcctctcaaggaatgctgaaaactcaagaagcatgggatgatggagagaaggaaaaaagatggagcaaatagctgccactcaaagaacacagaaatgcggccgggtgcggtggctcacacctgtaatcccagcattttgggaggccgaggcaggcggatcatgaagtcaagagatcgagaccatcctggccaacatggtgaaaccccatctctactaaaaatataaaaattagctgggcgtgctggtgtgcgcctgtagtctcagctactcaggaggctgaggcaggagaatagcttgaacctgggaggcagaggttgcagcaagccaagatcatgccacttcactccagcctgggcaacagagcaagacttcgtctaaacaaacaaacaaacaaacaaacaaaaaaacacagaaatgcataacgttccttgatacccaggagtgacagcaagactcatttcaaatcttagcctactcattagattgagggtcttaaagtactattctccctggtcagcatcactagatgagcttagtcaggatgactcttacagtgagaggcagcaaggggcacaaatgagcaaggtcatgtcaaggaattactgatatctgtcaataattttgtgaaggatccagactttcttgaagctttttattttgataaatttgctcaaaatattatccataattaatatgacatgatattagtcataaagcatgtttactaagaaaacaataaatctgttctggaagataaattttgcaaactcaacccgaaggatagtaggacttatcacagaagggcaggtttaaaaggcagaggaaacacgaacgtggaagaacgttgccagtaatggccccaatttgctcacacagtcctgcgtctgtgcattgtatagtccttccttacagtggctttggacttgtccaggggatttgtcttagtggatgaggcaatagcaaatgtgacacaaacagaaactcacgttgtgcttgtaaccctgagaataccattgtaagaagccagtgctagaggctgaagggcaagagaatgaaaaatatttagctgacagcttaccaagtgccagatatgccaaaaatctaagggagcaatggagttactttcatgtaactgagagtaaaatagcaaaatagcacagggctttcagaagcacagcacagtttcctactttgaggtctgattagttgctgtgcccccagagtgagcctggctaaagcaaagagtgtcaatagctaggaaggggctctgccaatgggaacatgtaacaacatggaagcaatggggtggactgtcaacagaagacattagtggtggatgctatgcttcttaatgggtgctgtgatgaataactttatacgtcaacctggctaggacactgtaccctgatatttggccaaacaccagtctagatgttgttgtgaaggtatttttggatgagattaatatttgaattagtagactttgagtaaagcagattactcttcgtaatgtgggtgggcttcatcccatcagctgaaggccttaagagaaaagaaacagattttctccaaggaagagggaattctgccaccagacctccttaaacatgaattcatgcctaggtctccagcctgctgtcctgctctatgaatttcagaagtaccagttctcaaaattgtgtgagcaaattcctcaaaatctctatctatctatctatctatctatctatctatctatctatctatcatcgatctatcatctattatccatctatctatcatctatctatattttctatcatctacctatcatttatctatcatctatctatctaccatccatcatctatctgtctatctctttatcatctatcatccatctattatctttctatcatccatctatcatctatctatctatatatctatatcttctatcatctatcatttatctatcatctatcatttatctatcatctatcatttatctctatcatttatctatctatcatctatcatttatctatttatatctatccatcatctatcatctatctatccatctgtacacacacacacacacacacacacacacacacacacacacacacacacattgctttgtcctgtttctctggagaaccttgatgagtactaaatttcaacaatgtagacgtatgttcaccaaggactaaattcttccttccaatccccctgcccttatccaatgattgctgcacattaattttcctccctatgaaatcaaagtagccattttatttaatctttccgccacagtccaattgtaagactaatgcaatttattctgtgttttgcatttgcatgtgaattatatatatatacacacatatgtgtgtgtgtgtatttatataacacaaacacacacacgtaaatacatatcttttagattcttactgatatgattgaaaggtacaaatcaaaatataaacttttgacatgatggcaacatgaagtttaactatcaatgccacaaacaaataattgacacaaataaaaatctgcattggcactataaattagggcagcacgtggtctgaaagtctaaccaatattccatatataagaccagattgcaacattctcctgagacagcaccacagtactaagtagagaagactctaggagattactcataaaaccctcaatgccggagtggaaacagcagaatatatgtgagaaggcggcacaacactttgaatcccattcactgtagtacatcaacagtaccaaaaacagctgcagtggggctgcactaatcaaaccactgcaaatatggacagcttctctccccgcagtggagggcaaacaccacagaagaaatcagccatggccatgtcttggaggcagcttggcaatggacaatgttgaatataggacagaaatgtgttccaacgaagtaagtccatcacactcagtgacaacatgatatcatggtgacatcctgaggcaaggattactcccaggtccagctcgctccccaccatacttagtctgtcaaaaagctaacttattaatgcaaatttacattaaccagaatgccaactccagctgcaaagtggagacgatcccactgacatatacatacattaagtaatctaaggagaatccatccaccctgtcaataactgaagatcagttccatgtagagtccttcatgccagagacaaagtaaatgagaaaaattcacaaaacaaattcacaaatatttctaagacatgcaatggcataaagattataatagtatctatatatacctaaaatactcaacttaaatggcatgatgtaataaagcaatcaatgaaacataacttacaagagaattttatgcttagagtctatgattagaagagaactttctaaaggaaggtagaaatagagaactagaaaaaaataagaaaatgatgaaaagttaaacatgcgataatagatatattctctattagcatctgtaaagggctgaatcggcagtgaagagaattagaattaatgttatgatgtagaaacttaaaaacttaatctggaagagagaagggagagagaaagctaaaaaatgaattttaaaacagagaaaataataatcgagatgtagaaaagagtgaagcatatcagtaaatgttgtttcaaaacaggaaatgagaacgaataagcaggcatatagttagttacaattattataaaaaatacaaaaatacctacaattgccaatcaacattttctgaactattatgtaagagatgtggtaataactgctttacactgtatgtaatacttattaaaccctcaggaaagcactaagtagtagatgttattattatatgcattttataaatgtagaaaatgagcttaaataacaaaacagaaaaaaattttcttcaactaggaaaaacctgaatcaacagacttaaatcagtcaccaaatttgtaaatacatcacagaacaagcaacgaaatggcaatggcccatttatattttgaatttcaaggaaagaaaaggcattacaggtatctaggcaggataaaaaatcagttttaaaaaacagcatatgcacaggcaacaaaacattctgccaaataattaaaggctttgaacaactacatataatcctaataaactgctgggaaaagtattgtagttttccaataagttagttaagatttcttttaaaaaaagatagtgtagcaaagagatgacacattaaattagcatatataaatcaatcattttcatatatgtaaacaataaaaagtatatataggaagaaaagacccacatataataataacacataataaaataaccgaaataagcttagtaagaaaagtgcaaagtctatattttaaaaactttaaagcactcctgaaagaccacatatcaaaattgaagacatgaaaagatagagtatattcttggttagaagacaactctgtaactgagcttgggattacaataaggagtaggtttgagaagtggaaaaatcggggttccattttggttgtgttgagtttgacgtttcggggagaggccttaggcactggagaagtgagtgtggagcactgtggagaggtcagcatgaaagttatgaattggagcattctcaacatatgtcacttagcaacagcgtgtagatgcagaaaggagaggaacctaggacagaaacctgaaccttccaacatttatggattagctgagagtgaaaagccaccacagaagactgagaccaaaccaaatggccagtgaaaaggatggaagagtatgagtgtgaaattctggaagcaaaggacaatcaatttgttcaaagagagaatattcattctgtattcccagtgcctggcccatggtaagaactcaataaatatttgttagatgaatgaaagtgtgaaagaagaaatggaattttcctagaaagatatattttataaaagtgtactcacaaagcagaagaaaaacattttagactaattccatatatgtgtattatacatatatgtaaactaaaaaaaatccaaaattttaacaaaaagttcaaatccatctgtattctaaaataataacaaaatatgactacatgtctaatggtaccaaaatctctgataaaatattcagccaaatgtgtcctggattgctgtaatagaaatgagttattaagtgctcattgataaaatactgaacactaagtctgcaaataatatagactcattggtcttaagtatggtcctgaagatcattcagccttctcctcctgtcttcaaatgggccatcagaacctgctcccatacccagaattagtctcttcttccatcttgccacaaaaccctctttcagcaaattattgacttctagaacatcaaaccatccctagagatcttcaaacgaccacttggctaccagagagcacacaagacagaaactaggcatgggtttctttcttattttaaaacatcttcagggagtttttgatagagttaaaactagacttggcattataaccacttagtctcccttcatgaccagtttcaaaaggcatgattggtttcatataggcagccaccaaagtaactttcataatatcagctacattattaaccacatcaaattgggatcagaatagccaccagattgattcattttccatgtgcacaatctgttacatattcagaacaatcattaatgtttcttaactcttcttgaaaccagtacagagccttggattttgtctagggtgaattacttcattcaaaaaaacaaaccaacaaatcagaaactaatttttcagcctgtcataaatatgactacagaacatgtatgttccttcctggatacatttgacttcatcttgtcataacagcttctaatgaatcttaaaaacttcctcaaagtgttcagcaagcaaataaaatcagttttccatgcacattatagctaaaacaagatcctacctgtaaattataaacaatgattgtttcttactagcttatgatatctgtgaagatttttcctgtttcttagatttttactgaactacaccttcaggttttttttgtttgtttgtttgtttgtttcgagacagagtcacgctctgtcacccaggctggagtgcagtggtgtgattttggctcactgcaacctccgcctcctgggttcaagtgattcttctgtctcagcctcccaagtaactgggactacatgtgtgtgccaccacacccagctaatttttgtatttttagtagaggcagggtttttcaccgtattggccaggctggtctcgaactcctgagctcgtgatccacccacctcagcctcccaaagtgctgggattataggcatgagtcaccgcgcctgacccagtctttaccttacagaaataatactcttttaaatctacttcacctctgatccttaatagtctttgccaatcagtagtttcctgattagccatgactgtgtcaatctattttttagcactgggattatttgtctggtcctatagttttaaaaaaacaggcatgccactgaagtgaggctgaaatgtgaacttggtaagactgtagcttcccttcctattaattatctcccctttcacctggtgataatatgatgctggcaatagctgctttgtctttacctaattgttttaataccacttaatcttcaacaatgagtattttaaaagctcatgtagcaaatgagctgggggtgtacacaggcctttatggacagaatttgagctgcatcttttgatggtattgctttataaagctagcttaaaatgagaaaaaattaaaaccttgcatcttcgtatactgttaattctaaaccattttaaggcaataattaccagaggcaggaaccacagctatgccgagttcctctctatcgatagaagggtgtgttacataggttggcatatcactgaccttttctgcagtcactgtaatgccagcttttcataactattgttttctgttttctcagaatcttctctgaacaatatgcatcttattttctttcagtgatgtgaattgtttgccacgtgtgaaaggttttacatattttaaaaaagccactaaatgtagctgggcatggtggctcacatctgtattcccagcactttgggaggccaagtgggtggatcacctgaggtcagaagttcgagaccagcctggccaacatggtgaaaccccgactctactaaaaatacaaaaaaattagcctgatgtggtggcacgcgcccataatcccagctactcgggaggctgaggcagaagaattgcttgaacctaggaggcagaggttgcagtgagccgagattgcaccactgcactccagcctgggcaacaagagtgaaactctgcctcaaaaaaaaaaaaaaaaaaaaaaaaaagtcattaaatgctttgcatatgtaggatcttgttccaggcaatgcaaagtgtgaactcataaaaattgttcccttactttggaaattagttttctgctacagaatagacacaatgtccaacatggtgaacaggtttatgacttaaatagagcgtttctctctctctcacacacacacaccatgtaggcacgagaaaaaaaatcagaattacaaataaaatactgatttcaaactgtatttaaagatgtagttaaggcaaaattataagttaatgagatgtatgtgtcttatagaaggaaagttcattaattcataatcacttgccataaattatatgtacaattattttatggacatgtatacagctgatccagtctaacgatcaccgatgacctgaatcaaataatatggcagaattaaggatgtgaaaaattgtacaaatatgctaactttcagtgaaatatgttttgactaccataaaatttatataaatgttaaaagcacagttcaaactgaattataatttttcaggaggtttgcttgcgtgccatattaaaatatccctgatgaaacatatttcttaaaaccactaagaaaaaagttcttgcaatgggaaaatgatttatttacctggatcttctatagttaagttctttatcaaccattgaacaatgtctgaacctagaaaaagaaaaaagaaaaacacaaacagatgtgaacattttgtttatacatattaactttaagaattctccacctttggtgctcatattagaaggaacttttctaattgttacaatgacagattaaggatctaccccagatggaatgctgaaaacacaaagtatggatacttagctgtccatcaataaaccaaggtgtaaactagtaaattattaaatatgaaatatgtaaatggaaataaaatttactgtactagtagaaagtgatttgtttactaaataagtgtttattaagcatctcctatatttcaggtacaagtcttagcacagcataaccagtattttataaggtagttcctgtctcatttttggttgtacccacctcatccttgtatcccctctcaagtcaaaccaaatttgtttttggttttcgaaccctcttacgtatttcaagtctctgtgtctccacagcagtactctccctgaccgaaatgtcttcccactatttttaagacactcaagattcactgatatgacagaacttgccttggcccttcccctcgtccactgagttcacagtactgtccatgaaacctcattggaacccatgcagtcttttattgtcgtgttgatcacacaccattgccccagctgtttatttgatgaatgccccaaagtaagaaccttgaagcagggtgtcatattcatctttgattatttggagcatagtaagtgcttaacaatgtgtgatgaatacaaagtatgagcaaatatgtttctacttcacacagaagagacaagagaggtctgcagaaaacaatgtttgagctagattttgaaggatgtatttttatctatgaataagagagaaatttagttgctgaaggggcctacgtaaaaactaaaaggtggaaaagcagtcaacagaaataatttactgcacactgtctatatgtaagtgctgggaataatagaaaattgaaagtaataatggagtgcacagtatattcagcaggtcttgaattctaggctaaagaattaaattttctttttcccataaggaaagcagagaaagagacatgcaatatttttgagcagaagaatgacattatcaaagtaagtttgaggagtatgactggcaatatatatgaaatgccttgtagtcaaaaagaaggcaaggcagtcgacatgtctactagttgcaatccaaggatgaagggaaaaggtcttagttcagtgtacaaaggaatttcttaaaaaattacagacttctttcaggactttacgactaattaggtataaaggttataagtaggagagattaaaaaagaagtcaaggtttctagcccggaagcatagatgaatagaatgatgaaaataagagcagaaatgggagatttagcaactgatttgcttgagacattcatttgtatttaaaattggttttctgcataactcttttctacacaaaataggaaaaatatgtatgtgaattgtttgcatacatagtaaactgtgttatgcctgcgtgaattgaatcaaacttcagtgtgaaccaagattccatttcagcctctcctggaggctggctagagttgctgtctacccacctcggagatttggcaaattaattacattaacattggcaaaataattctagctgcttgaattaaaccagttcaaaatcaatttaagaataaatttgattactaaacttgacaataaagtcccaaaagttatgagaacattcatactcaatgtcaatttcagcatgcatgcatttaaaaaaataactccaagtattgacttgaacttgtgttccttttacagctgccatggatttaaatcatttgggaagacagactcatccagatcctaaaggaagttttactaaaacagctctaagggtcaaatggaaaggagatcattctccagaaggcagttgaccgtgtcccggtgttgtgttcaaccttatagtcttaggttatctggaagcacgatcttcccattgaaaaagaaaaggagaactcagcttttcacatatacatgtagtgatccttgaccaatgtcgattcccagatacacaaatcttccgcacaagccccaagcaccctgctcatttttcagagttgagcatctatttgtggaacatatgtgagcagccactggaaattttccattcttttgaagacagccaaacattcattccaggactatacatattttttattgtgaaaaatgacttgaaaaatgctcttagagactaagtttttaaaaatattctgttctgttacgctttctttccttttctttttttttctgggcagaaagaaatacaaagaagcctaatttaaaagtatgtttaattcagagaataggaaactttctttcttagcctacttttgagtatttctgtcacaagtgtattctcagttcagctctgaaggagtcaatttaattggacttgaccaactgctagtgccacttagcagatgctgtagtagtttttttattgtgtgatcgccccagcatatttatggttttaggttatggatttttaaattgttaaattcttacccagactcaccatgttaacctatgctccatctgtaagagtaagacctcaactccttgaagagataggtagagagagaaagaggaaaaaaatccagtatcttattggaaccagaagactgaaagagaaacgtgctcctatagagtcatcttgagaagcatgactcaaatttaaaatggagcattacagtccagagaagtgtagtaggaatgccacctttacagcaattttccagctttatattaaataaataaataaataaataaataaataaataaataaataaatggctgggtctgctgaagtttttcacatataatgtatatgtagaaaattgtagcattctatttaccttgattttggagccctcaaagtaacctgtggaattttttgaaatcacactttcactgtagcctatggaaagtttatacaggcatatgtcacttttagagttgcagagctttgtgctccgtctgctcagcagaagcagtagaggttttattactgtcgaatcctagcagtatattatttaaaatgaaaacaagcaaaaacaaacaagcagaattcttcctcatcacactgctcatagttttctacctgctatactgtttcttccttccatgattttgctaatgctcttctatcttcatctctttttcctgtggtgaatcccaactgaggccataaagttcaattcaaacattatctactccaggaagcctgttgtgcccacccctcaacaaaagattgaatgaataaatagcaagactcccctccccaaattctattttcacagagtttaaaaagaatagtatccttcatgcaaagaatattctactggcatgtaatttaaacaccactattattttttttttttttttttttttttttttttgagacggagtctcgctgtcgcccaggctggagtgcagtggcgcaatctcggctcactgcaggctccgccccctggggttcacgccattctcctgcctcagcctccggagtagctgggactacaggcgcccgccacctcgcccggctaattttttgtatttttagtagagacagggtttcaccgtgttagccaggatggtctcgatctcctgacctcgtgatccgcccgcctcggcctcccaaagtgctgggattacaggcgtgagccaccgcgcccggcctaaacaccactattattaaacatgatgttaaattgatcttaaacttcaacattattttttcacccatgccacggatctgaacggcaaacgagcttccttacctgtgccccctgcagagtgcaaaggcctggaccaggctctgtcctaagcctgtattacttccattacggtccacgtctgcacccctccccaggattagagcacatcctcagctacaagtgtcacctacagctatccacaaactaaatctgaattagaggtgcacaaaaatattaagcattcatgaaaaaaattgcaaaatatttgtaaatataagatatgaggactctgtaagcaagcaaaatagaacacatttgatttgcatcctttacaaaactcaagtattttcataattttcagctaaagacattagtgaaaacttgagctcttaatcaccatagaaggtgcgcaaattattcctgaggcaaagacgctgacctttgcaatgtttctctttcagggaaatggaaaagctctttgtactgcccaaatacctttgctgaagcctcagaaccacatagacacagtgctgacaatacaaatatttttatttagtgaatatcataaataatccttaatccatgatttttgatgttataactattcttctttttttttttttttcctttgaagacagggtctcactcaggctgcaagacagtgcaacaatcacctcatcgcagcctcaacttcctgggctcaagcaattccccctgtcccagcctcccaagtagctgggattacaggtgtgagccaccatgcccggcaattttttttaattattattttttggaggatggggtctcgctatgttgcccagacttgtcttgaaatcctggccttaagtgatcctcctgcttcagcctcccaaagcactgagattacatggcatgagccaccaggctcagccaactattcttagaacctctcactaaatagaagactttctatatactaaaaatcatttttccaacattattctttgttccttgaagtaggcacaataaatgtttattatcatcaaatagcatgtaataaacatctattgcgtttctgtagaagtttggctgaggatctgcactttaaggaacaagaaagaaagaatgtctagcgaagcaaattaactgatctgtcagtcccttgagagaagaaacgacatcatactcatcacgtttccaccattctcttcaaagtgcttcaacacagatcatcgttaaatgtttactgaaggcatgagtcactatttatggacatctactctatacagaaaagactccaaatgctgaaaaagtcagctctaatggtgactccatctagtatgttatgacaccacagtgtatctctcattatcataatttaaaaagttcttcatgcaattataattttaactcaatttaatttaaaacacggcagaatttctttaaattaaactcaattgaatttctttaatttttaaattaaactcagtttaaaacactgcagaatttctgtaatttaaaacactgcagaatttcagtttaagttaaaacactgcagactttctgtttgagaaatgaagtgatttgcttaaagctagcatattacccttttgtaaagctgaattaatgaactaaatttctccacaatctttccaataagtaattgctaatatctaagaataacattttgtttatttgagtacttgtgtcctgtccagagccttaaatatgattgcacagccattgtcacatctgagggttcaacaaagcaaccttcaaccaaaggagcaggagagatgaactccagcccagctacagactatgttctctaaccccttgatctaagaaatctcagcaatggcaaaaatctggatatcaccaattaatggccggtgtcctagttctgtctgcctttggccaaaagcgggtactgaaaaaagagaaaagcagccactggcttccaggaactggctgggcactcacagctatgtcttggtgcttccttggtaaatatgaacaatttcttagaagaacattaacaccggacaaggccactctagaaccctcataggtcaagataaaaacaagaccactctgtaatcagatctgaacacaaacaaaacatgaacatgggctgagccataaaatatcaaattccatcctggataacatgagcgactgctgcttctttatcaatgccatatttagtcttgtctaatctgtcctcctgtagaaaaaatgtattaagatacccaatcaggccggccacggtggctcacgcttgtaatcccagcatgttggggggccgaggcaggtggatcatgaggtcaggagatggagaccatcctggccaacatggtgacaccctgtctctactaaaaaaaaaaaaaaattagctgggcatgatgttgcgtgcctgtaatcccagctactcgggaggctgaggcaggagaatcaaaccagggagctcgaggttgcagtaaactgagatggcgccactgcactccagcctggcgacagagtgagacactgtctcaaaaaaaaaaaagataccagataatggaattgtccctacttcctgacagcacccaatctagagcaaaggcccacttcctcagatcctctccatgactaccaatgccaaaatcctgtaatagattcttcctaaaaccctattactgagacaccccatggttcccgatggcgtgcattctccctaccctcaagaaagaataaagttgacttgttcgactataggcgtgttcctggtggttttgggctagaggcatcgacatttttttaatttaaaaaaattgctaatatctattaagattaatataacaacaacaacaaaatttaagttacttcatcagggcgcttttggttgtaaagagtgatctttgagggaagtataaaaacataaacttatcaaagaaggaatttgcaaaaaggtacccagaactaaagggaaaggatgtatttaggcctcaaggactcatggaggcagagactgtcatccttgctcctttctggacatcttcatttctctctaggaaacaacctttgctattttccatccacaaagtgggtcatgaaggctcacagctcctgggttaaaatctctgccactgaagacggcaagacatttgaggctgaaatcttttagtcctaagtcttaattcctgatgaagggtctcagctgcagggaggtgcccattcctgtatcagccaactgtggcaagaaaagatggatcactgtgcataaaaatggtcatgctggcgagaggtatcgatggaggcattttccagaaagaatgagtgctttgcagacataacaatgggtgtaaactacagcttccttccagtttgtaaagcttttatgtttcatcataaaaaaaaatgcagaaaagagaggaaaagtggaattcaaaagcaaaatgtcaaattttgaatgaaacgaatatgttattctgccttgctatgaatataaatgtgttttgttctatgaacttattatagtcccgtaaagcagagtaggaatacattgtttttgtgtatgtgaatgaaaccacactttatgtgcactaaaacagctactcaaagaaacttcgtgatgtgtatatgattttgtgtttttatgagtgggcatatttttaagtaaataattcactttctaaaatgaataacatgtaattgagtattgttacttctggatttttatacatcaggtatatctagagaaaattattcagttttcatagaattaaaaagattaacttctgctcacagtttgaaactggatcaaacttatgatataaagcccttcttccaatattccatagctaataacacctatgaaatctcaaaggtcaatggaaacaaaataatcaaaacagatatgtttcctttcagtaaacctcagatacatttgaagcatttgcctacgagactttaaaaatgttgttcagcagtcatttaaatgcatttgcagatgtcatggcaaaaagcaaattatctggttgattacattttctttctaggttgttgctctttagagttctctgccccttgccctaagagcagagtcacagaaaatgttgggttttgttgatataacttgaatcttcaaatcaacaggatagaagcccgatattcactgtaattactactactgtgttctgaggataggaaaagtaaaaatatatttccctaccctctggcaaggtacaatgaaaacaaattagagttctgtggtagagctccttggctgttccttgagcagacattttctcaagatcatggggatttaactagatttttaatctttgttgtgtaagttccagaaatcataaaaatatctcttcagacgcaaagcaggcattttgtctctcttcaaagcccaagaagctttaaacctaggcagcaaaaacagcaaggcagcaaagatgacaataatgaggagataaaaggtaatggagaccaccctcaggattatttcctgccctctactggagctcaggaggattccttatcaaccagagaagcttttcccaagtcgcattcagagaaacatcacgtctgcctcttgtgtgggatggtgacagtaagtgtgggaaatgcggagttaagagaaggaaggaaaatagggttccttgatgtgcagcctttattttgataaagcaagttgtagaaaaatcaagagaagactaagtccgcagtgtttccttaggatggggatattggatccctttttaaagaccattttatatttttatgttttagttctatggttctttagactcaaagaaaataaaacaagtaataagtgtgtaaaatgttcagatataactatgaattttgggtcagctaccatattggaacacattagaataaattatttattaatcgattaatcaattccatatgctagctggtaggcataaagaaaatcctagtggatcattcttgccctcaacacatatatttttttccagctacacacaggccatgtctaactgtctaactgcctctatgaaggacataggagataaagaaaatgtttattgatcgataaattaaaaacttgctcttgactggataggcacagacctcatcaatctagtccagacacagttgctgtatctgttgacaggtagagataatactttttattctttattagcagagagtaccagcattggtcaagaggtggatgaggcagaaggtacaagtagatcaaagaggattccaattccggaaatttcccagttcattaaagattgacaaaatgaatgcacttatgcatagtcaaaactacagctcaggccgggcgcgttggctcatgcctgtaatcccagcactttggaaggctgagatgggtggatcatgaggccaggagttcaagaccagtgtggccaagatgctgaacctcgtctctactataaatatgaaaaaaattagccaggcgtggtggcgtgcgcctgtagtcccagctactcaggaagctgaggcaggagaatcacttgaacctgggaggcagaggttgcagtgagccaagatcacgccactgcactccagcctgggcgacagagcaagactccgtctcacaaaataaacaaaaacaaaaacaaaaacagaactacagctaaggccaagtgcttttgtgccaatcctaattattttggcactgaacgtgctctatatagtgctatgtatagaccaaggcccagattgaaaagagtgaatctttttaaaaataaccctgaatatttcctgctgtgacaaaatattgaaaataccaattaatgatgccatttttggggttctatttaaaatgttttctattattgaagatgtaatttcaataccatgaggtattgaatgatcacgaggtcaggagttcaagaccaacctggccaaggtgctgaaaccttgtctctactaaaaatacaaaaaaaaaaaaaaatattagccgggcatggtggcgtgcacctgtaggcccagctactcaggaacctgaggcaggagaatcacttgaacccaggaggcagaggttgtagcgagtcgagattgcatgactgcattccagcctgggtgaaagagtgaaactccatctcaaaaattaaaatgaaatttaaaaagaaagaaagagggagagcgagaggaggaaggaaagaaacagaaggaaggaaggaaggagggagggagggagggagggaaggaaggaaggaaggaaggaggaaaggaaaggaaaggaggaaggaagggagggaaagaaagaaggaaagaaagaaagaggaaagaaggagagaaaagaaaggaaggaaggaaagaaggagaaagaaagagaggaaagaaagaaagaaagaaaaagaaagaaagagagagagagagaaagaaagagccaaactattttccagagggcctgagccattttacattcctaccagcgatgtaggagtgattcagtttcttcccatccttgctaacattagtgttcctattttttagttcaacctttctgatagtatgtgttgattttcatttgtgtctgcctggtggctaatggtattgaacatgttttcatatgcttttttggtgtaggtacatccttttctgtgaaacgtctcttcatgtcttttgaccattttctaattaattttttttgctattgttttttcagttctttttatattctacatactagtcctctcttggatatgtggtttacagataatttcttttactctgtaccttgttgttccaccctcttcacaaggtctttttcagaaaaaaaaaaagtttttaatttggatgaggtccaatttatcaactttttatagattatagtattaaatctaagaactctttgcctagaccaagatatccaataatttctcctactattttcctaaattttttttgttttaattttccattttgtattagtgtttgtataagttgtgagacttaggtggaacttcctttttgcccgtgaatgtccaatagctctagcaccatttcttgacaaagctatctttcctcagttgaattgcttttccatgtttgtcaaaaatccattgtgtctatttgtgtggatctatttctggattctctattctgttttattgatctacatgtctatccttctaccaacaccacacagttctgtttaccacagttatataatgtcttgaatatataatataaacataaaataaattcctcccacattatttttctttcaaaattgttttacctgttctacttcatttgctttacctataaatcttagaattatctctatatctacaaaaaaatcttgctggggttttgaaaggaatttcattaaacttgtgtatcaatttggggagaactggcttttatacaaggttattcttcatggatttgaagtatgtctctccatttatttacatcttcttttatttctttcaccagcattttgcagttttcagcatacaagtcctgaacaaactttatttgattaacacctatttaatttttgggcaattttaaacagtattgtgtttttgatttcagcatccacatgttcactgttagtatataaaaatgtaatttacttttgtatatttattgcatatcctgtaatctttctggactcgattcttagttctagaaggtttttttgcagatattttgggatttaacaggtaaatataataccatctgcaaagaggggaagctttaatttcttcctttctgatctgtgtatctcttatttccttttcttgctttattgccctgactagaaatttcaacattatgttaaataaatcctcaccttgttctcaattttagaggaaaacattcactcttttacaactacatataaagtaaacttattattattactattattatttgagactgtgtctccctctattgtccatgcttggctaattttttaaatttttgtagaaatagtgtctcactatgttgtccagccaatgatctcaaactcctggtctccaagtgatccttgcacctcagcctcccaaagtgctgagattaaaggcatgaaccacagcacctggcctaaagtttttgtagatgttctttatcaagttgaggaatttctcttccattcctgttttttgaaagtttttattatgaataagttttgaattttgtctactagcttttctatattggctaatatgatcatgtgatttttctattttatccagttaatttgctggattacagggttaatttttgaatatttaaccagcctgcatctctgaaataaacccacttggttatggtgtataattatttttatatattgctaaattctatttgttatattttgctaaggagttttacatcttaatgaaggatactggtttgttgtgttcttttctctacgttatttttctagttttgacatcagggtaataatagcttcataaaatgaattgagagatattctctcctcttctgttttctggaagagactgtgtataattgaatttttttaaagtctggtagacttttccagtgaaaccatgaacctggagattttgtttttagagatttctaaattatgaatttaattttcttaatagtcattgattgcgctattcaaattatccatttcatacagggtgagttgtaatagtctgtggtttttgagacactgatcagttttgtataagatgtcaaattatgtgtttaagtttatggtattcttttatcctttagatgtctgcaggttttgtagtcatttcccctgcttcattcccgaaaatggcaatttgtgtcttttctttttttttttttgtcttgttacagaactgtcaatttatcaatttttataaagaaccagctctttgtttcattggtttttaaattatttgaatgttttcaattccattgatttatgctctttattattttcttacgcttgcttgctttgggtttattttgctcttcttctatgttctagagtttggagtttagatgattgatttggaaattttcatcttttctaatgtatacatttatgttataaatatttctctcagccctgctttagcagtgttccacaaattgacatgttacattttatttttattgttttttttttattttccagaagatccttcaatgatattatttaaagtgtgttgtttaatttccaaatgtttggagattttccttttagttttttctcattgatttctaatttgattccattatgatcagagaacatacttggtataatgtctgttttttaaaacttattatgatgtgtttaatggcccaaaatatggtcttagggaatgtttcatgggaacttgagaccatgaaaagcaaaacaccatgctttttgctgttagttggaatatcctgtaatcaggtcaagctgattgatcatgttgttcaggtcatctacatccttactgatttttctgcctgcttgatctatggatctatcagttactgataaaggagtgttaaagtctcagctctaataatggaatagtctagttcttctttcagttctatccatttgcctcatgtattctgaatctctcttgttagatacatacacatttaagtttgctacgtcttcttggaaaaatgagctcctcattattatctaatgaccccctttattgcttccacttttccttgtggtgacgtctgcttcatatgaaattaatatacctattccaggtttcctttaatcaattttgcacaacacatcttttttctattcttttacttacaacctgactatgttgttatatttgaagcaagtttcttggggatagcatgtagttgagccatgattttatccactctgctggcctctgtcttttaaatagtatatttaagtaattacttgtattaaatgtaattaccgatatgtgatggtatatttaatgtaattactgatagggcttaagtatgccattttattttttgtgggttttttttcttgttcctgccttccagtggattgcattaatattttttaaaatccatttcaattttctaagtttgtttgtttgtttgcttgtttttacagtcttgctttgtcacccagtctggaatgcagtggcatgaaaatggttcactgcagcctcagcctcctgggcttaagtgatcctcccagctcagcctcctgaagagggaacacagatacatgctactatgcccgactatgtttttattattattatcattattattattattgctgttattatttagagacagggtcttgttatgttgcccaggctggtctcaaactcctgggctcaagtaattttcctatttcagcctcccaaactgctaagtatgattacaggtgtcagccaccgcacctagctctaaatatttttgaatgcattattgtgcagctctttttagttgatgataaaattatattcacacaacttattatagccttccggtgtaatcactttaccaatttgagtaaagtgaagtatggaaccctatgtctcttcatgttcctttactctccccaatttttaatgttttttagctaattcctctatgtacatttagaatcatatcagacgttgttacatttttttcttcaacaatcaaaacaatcaaaaaaattcagaaggatgggtgcagtggctcacacctgtaatctcagcactttgggggaccgaggtgggcagatcatttgaggtcaggagttcgagaccagcctgaccaacatggggaaaccccatctctactaaaaatacaaaaattagtcgagaagggggcacatgcctgtaatcccagctactcaggaggctgaggcaggagaatcacgtgaatccaggagacagaggttgcagtgagcggagatcgtgccactgcactccagcctgggcaacagagcaagactttgtctcaggaaaaaacaaaattttcagaaaatcagagaagataagtctattgtatttcttacatgtttgcttaccacgttttgttcttatctgatattccaaggttccttttcttatcgtttcccttttatttagaaaattccttttaatcattctgttagagttcgtcagctggtgacaaattctctcagttttccttcatctgagaatgttttcatttccccgttatgcctcaggaaaaatgtttgctgggcagaggattacggattgacagttctttcttttcagcaggaaaggaaaaattttgtggcactttcttctggcatccacggtttttctcatgagaacgctgctgtggtttgaatcatttttctcttctagttaatgtgtcatttttccctgactgctttcaagatgtttgttttgtggttgtctgcagttttcaaatgtttattaagtggcttggtatgcatttcgttgggcttatttatcctatttgggcttctctcagcttcttcaactgaaggtttatatctttgctatgcttgtgatgtttttaagccattatttcttcaagtactttttttttttaagttcagctttttattgaacacattataaaagaggtttcgtcaaaaagaccaaagcccatgtcaccatcagacttctcggattcttctttctttgcttccactttcttctcctcagctggagcagcagcagcagaggcgggcagaagctcctgctggtacagatagagccagctgctggaccaggtccaccagcccctacattgcagaggaggctccccatgttgactttggccaggcctttgcaaacaagccaggccaaaagggttcaacatttacaccggctgctttaatgagggcattgatcttattctccgtgacggtcacctcatcatcgtgcggaatgagggccaggtagatgcaggcgagctgggagacgaaggccatggcacgggtgagtgtggggctggcgctgccggacgcggatggaccgagcaccttggtggcagctgaggaaaggttcttcaagcacttttttagtccccttatctttttcctatcctttcataactccaatggcaccaatgttagatcttttgttataaacccacaaaagatctccatcccagaggccgtgctcctttttgtcagtctgttttctctccgctgttcagattaggtaatttctgttgttctgtcttctatttcactgacttagtggtttcttccatcttatcgattttgccattgagcccatccactgagttttcctttttgatgttgtccttttcagtcctaaagtttccatttttttataacttctatttctttgctgagaatttcagtttatttcctgaggccttctagtttgtaatatgcttaaagcatattattattattattattaaataatttttatcatagatcaggggtgtccaatcttttttggcttccctggccacactggaagaagaattacacataaaatacactaacactaatgatagctgatgagatttttaagaatcacaaaaaaaacaaccaacctcataatgtcttaagaaagtttacgaattgcttttgggccatattcaaagatgtcctgggccacaagttggacaagtttgtcatggatacttcaaaatctttgtaagctaatctattaactctgtcatctcaatcttgaccactattgatatatatattttttccatttagttagaggtcttcctggttcttggtacgatgagtattttgttgttgttgttgttaatacagcgtctcactctgtcacccaggctggagtgcagtggtgtgatcttgtctcagtgcaacatctacctcccaggctcaaatgattctcgtgtctcagcctaccaagtagctgggactacaagcatgtgccaccacgctcggctaattttttttttttcccagtagagacggggtttcgccatgtcggccaggctgttcccaaactcttggcctcaaacaatccacccacctcggcctatcaaagtgctgcgactacaggcgtgagccactgagcctggcctgatgaatgttttttaaaattgaaagctggacatctttgtattttgttatgcgattctgggttgtcgttggcttttgatgacaccactcctccggaagagggaaatgctgtttcatgaccacctgctgagggtagaaatttgacactgcagtgagggtggcctggtcaccactgtttgatggcagaagtctcgatgctcccttaggcttcttctgacaccactccagggtggagaagtggggtgttattactaccaggttggtgtgggatatccagtctcctctcgtgatcttcactgaaatgtggatgggggaaaggaggtctcattcctgacaagaagcagaccagtggtgactagggatggggcggggtgagggaaaatgaagaaaaatgggtttcaaaaaggcacaaggaaacttttggggagaataaaaatttctactattttgattatggctgtggttttagggatatattcatgtgtccaaatgcatcaaaattttatactttacagctatccaggttgtgtattaattatcccttaataggtataaaactcaaaacatctgaaaacaaagaaggaaatattttaagtctccttactcatgtcttcaatgtgaattaggttgtaagatggtaagactttctttttttcagcactgaatggtccagaactgtactgttcaatatgttagccactagccatatgtagctaattaattcctcatttatttcttttcttttcttttcttttcttttttttatacagagtctccctctgtcacctaggctggagtttaatggcgcaatctcagctcactgcaaacctctgcctcctgggtttaagtgattctcatgcctcagcctcccgagtagctgggattacaggtgcgtgccaccacacccagctaattttttttttttttttttttttagtagaaacagtgtttcaccatgttggccaggctggtctcgaactcctgacctcaggtgatccacctgcctcagccttccaaagtgttggggttacaggtgtgagccaccgtgcctgactagttcctcattttcactagctacacttcaagtgctcattacccacatgcagctagtgaccaccttactggacactgcagatatagaacccttacatcattaagaaactcttggacagcattggttcaggtattacaatattatgggaataattatctggatatgtgtgtgtgttcatgtgtgtgtgtgttttcataggctaatttttactttttcaaaatgaaattatgaatgtgaaagtgaatagtacaggacctaacacaatatagctatacaacaacaataaaaatgttagcatctcttccatccagtttggaaaatcttttatttgaaataagagtaagaagtcaattgagagaattccaaaaggtgccccaaagcaaaaacaaaagattgaggtttaaatgaactgtacggtataaaaaaggcaacaattttaaaagtaagatagtaaggataaatagtaaaatagtaaggctttctaattaagatacaaaacctagcagccataaaacaaatggctgataaatatgaattcacataaatttaaaaatttctatacagaaaagaagaaaaggcactataaacaaaataaaaataaataaataaatgactggtatacccagacaacaaaacatcattgagttctaaaaagaaatgaactaccaagccatgaggagtcatggcagaaccttaagtgcatattactaagtgaaagaagtcaatctgaaaaggccacacactgtatgactccaacaatgcgactttgtggaaaaggcaaaactatggagagagtaaaaagatcactggttgtcaggggtggaagagatgaacaggtagagcatagaggattgttagggcactgaaatgactctatatgatattccagtagtggattcttgtcattataacccatagaatgcacaacaccaatgataaaccctaatgtatactatggcccctgtgtgataatgatgaaccctgtgtgataatgacgcgtcagtgcgataatgatggcccctgtgcgataatgatgcatcagtggaggttcactgaaccgtaacaaatgtactactctggttgggacttgttggtagtggaaaagactgaggtatatgagagtaagaggtatacaggaaatctctttacctttctttcattttcctctgaacctaaaactcctctgaaaagcatagtcttaaaaaaataggcccggcgggatggctcatgctggtaatcccagcactttgggaggccgaggcgggtggatcacctgaggtcaggagtttcagaccagcctgaccaagatggtgaaaccccatctctactaaaaatgcaaaaaaaaaaattagccgagcttggtggctcatgcctataatcccagctacttgggaggctgaggcatgggaatggcttgaacccgggaggcgtaggttgcactgagccaagatcgagcctttgcactccagcctgggcagcaagagtgaaactctgtctcaaaaaaaaaaaaaaaatggtaccacactgtgaagacatttttgcaatcaactgaaaatggaaagtgtattcttccatgttgtctccccagcactcatcattttgctgtcacattttatatttactgatattagattttatgtatctttgttttaattgcccacttagacacagttcatgagagcagtgattttatttgtcttgcttatgcctgtatcttcagtgtccaaagtagtgcttggcatatgataagtggttggtgaatgaatggaaaaactttgagaaattgacaaagagaccagaaaaccaatagcaaagcaggcagaaatgtaaacaggatgttcacgtaaaagtcaaatacaaatgattcatattaaatgatgaataatctcattcatacttcaataaattctaattaaaacatatgaatacaagttttcactcaatacattcgtaacatgaaaacaaaaaatttataatacaccactttgaagaagagataggcagcaagagttttcatacacttgttagtttctttgtaggatacttttacaatacttataaatttatagttattacttttataactcagcacatgcactattttaaaaatttacactattggtatactcgcaaataaatgtgcacaaagatatatactcacacacatacacaaagatacttattttatcattgcttataatgacaacaaaaaaagtgctgtgccagccgggcgcagtggctcacgcctgtaatcccagcactttgggaggccaaggcaggcggatcatgagttcaggagatcaagaccatcctggctagcacagcgaaaccctgtctctactaaaaatacaaaaaattagccgggcgtcgtggcaggtgcctgtagtcccagctactcgggaggctgaggcaggagaatggcgtgaacccaggaggcagagcttgcagtgaaccgagatcgcgccactgcactccagcctgggtgacagagcgagactccgtctcaaaaaaaaaaaaaaaaaaaaaagtactgtgccaatacaatggatatcatgctattctgatgatgtgagcacttccctaagtgccaaccttactatcagaagaggacttggttgggaaggataatggaattccatcaagtgttttatcttcactaaggattttgagtttgcatcaaaacctaattactgcaaaaaagcatcaggacccatttccaaaccctcatgaaggggctctcccactcctgtatctgcctccagcaaagcactactgggatccactcaccagattatttatttatttattttttgagatggagtctcgctctgtcaccaggctggagtgcagtagcacaatctcggctcactgcaacctccgcctcctgggttcaagtgattctcctgcctcagcctcccaagtagctgggattacaggcatgtgccaccatgcccagccaattttgcatttttagtagaaacagggtttcaccatgttggtcaggctggtctcggcctcccaaagtgctaggattacaggcctgagccaccgtgcccggccactcacctgattattaaaccagattcatttaggactctgctgggcactgcgagggaataacataacagaagcatcatttctacccagaaggacttcaccgcctactaaggcaagctgtgtatagaggagaaagttaaatcattctgactactgcctttaatccaagactaaggcctgaaatcctgaagaatttacaaaatgcttagacctccattataaacttgcagttgccatccccagcctttcttactgctgcttggtaattcattttccaccaatttgttctctccttttgttcattccacaataatgagtatacatcgtgtaataatggggatactggcactgtggagagacatggtaaaaagaatggaggggtcactcttaagaaacctatttgaacagtatctgaagtgaggaaacagataaatagatcatataggcatgaaggaaaagcctctcctttgccctctgaaggttcattgaaaatcattgacaagaggcagattaataggagaaaaagcacacgaacttaatgtgtatatggaagccttctggatgaagacccaaagatatagaggaaattgtccatttttatgcttcgagtcaacaaagtctggaatatgactggacagaaagggaatgatctaatgctactagactgagtggggaagcccagcaacgcctgtccctctagattcttctggcctctctgagcagcattccttccttctgggtatggggcagagctctctctggactgggggtcttaggacctacagtccaacaaggcaggtcagataacttctttatgactacttttacggctggctttgaggagaaggggttctgatttccatgacccgcctcgggccagagggattctagtctctggggagaatggaacaggtcaggagaaggtcagagaaaaagtttgcttctgaggctgcttcagggtattgcattcttagtcccaacaattccaacgtggtaagtgctaggacagacttaagaacagccgcctacaggctcacatacatgaggtgcccaacacagactgagagagaaggaaagggaggaaacactcaggaacttgagtttatggtcagcttcctcccccattctttatggtgactgttccaatctttcaccatggttcaatttctcaatcacttctatgaagttgctcaaaacaaaagcaatatacagaagtttaactaaaaggtatagccctatttgacagagggataatttatacatacagttttgcacagattatatgcacagaattttagtccaaaacttgcaaagttctgacaaatgtatgcaccacgtcgattaaggtataaaacatttccattgtggtaaaaatttaaatgccctcctgatctttcacaccaagatcaccccatgccctgacaaaaaaaaactaggattctcatttctgtcaccacgttttagttttgcttttatgaaatgaaatctcacactatgcacttgctagcgtctggcttctttttatttactttttattttttgaaatggagtctcacactgtcgcccaggctggattgcagtggtgtgatctcggctcgctgcaactctgcctcccaggttcaagcaattctcctgcctcagcctcccgagtagctgggattacaggcatccatcaccacacccacctaattttttgtatttttagtagagatggggtttcacttacgttggccaggctggtctcaaactcctgacctcgtgatccacccgccttggcctcccaaagtgctgagattacaggcgtgagccaccgcgcccggccacgtctggcatcttttgctcaacatactgcttttgattgtcatccatgtcattacctgtattcgtgttccaagttgctgagtcacttccactgtatgaatctactacaatttgtatatagaccttcaaattttttccagtttatggctcttataaaaaatgctatgaacattcttgcacagagcttattgtagacatatattttcgtttattttggtaaatcccttccctctgcctttggtagacatataacgtagtattctgagtcttaaaagttagaaggttaggataaaaaaaaacccagtggtaaaactgtatcaataattctcaatctgatttttaagtggcctcagttataatcttcccttgtctctcacttcaattagaaaatgaaggttagcaaatattaatgccatcaatatacagcctccatacacatttatctgtctttatagctcctttctcctgttttctgttggactttgaggaaaaggtttctgttttcctgtccaaggcaaatccctcttcatcttattttctaccatctcctcaggagctttactgtactttgccctcaagtctttttcatattaaaaaaatgtctatatcaagctcgctagacaagaacatggcacacacagtctggcaaacaagaaatatatataaataatcctacaaacagttacataaagtgaaaagttctgtaaaggaaaactagagggaacaatgaaagattaaaacaacagatcctgatttagtttggaagctcaagagacttctctgaacacttggatagaaaacgttgaaactacagatgagagagaattataaataaggaaagtacttcaggagataggacagaattagaatcaaagtacagttgatgcttgaacaacacaggtttgaactacacgggttcccttataggtggactttcttccacctctgccacgaaagatagcaagaccaacccctcctcttcatcctcctcctcagcctactcaacctgaaaataataatgaagccctttatgatgatcagctcctacttaatgcataggaaatgcactttctctttcttcttcttcttcttattatttttgagatggagtcttgctctgttgttcaggctggagtgcagtggtgtgatcttggctcactgcaacccacgtttcctgggatcaagcgattctcctgtctcagcctcctgagtagttgggattatagacacatgccaccatgcccagctattttttgtatttttagtagagacagggtttcaccatgttggccaggccagtcttgaactcctgacctcaagtgatccacccatctcagcatcccaaagtgctgggattacaggtgtgagccactgcgcccagccttctttctttagattttcttaacactattttcttttctctagcttactttattataagaacacattatcgtaagaacacagtggtactttactaccacttcaagtatgttgaatgctcttttattcttggatatataataatagggcataatatatataatgtacaaatatatgttcatcaactatttatgttattagtaaagcttttggtcaacaataggtcattagtagttaagtttttggggaagtcaaaagttacagatgggtttttgactgcatgggagttggtgcccctaaactctacgttgctcaagactcaacggtgtaaggaatttgatttaggtagaaacagagtcaaaaccctttttctgagatagaaagaaagaatttgactagaaagtgaaatcagtttaaaagcgtggtatgagtatgtgtattccttatttttcctatgaaccagaaggcctgacaatcttttgagggagctgaggatgatacttgaaatttgaaggaagtggtgagaagttagaagtgctactataagaaatgagagaggctgctggcaaggaattagtaaaaggtttgctgagaggtcctgagggcccaggtgagggtggaaagcacctgtgattaaggcgctgcatcttgtacctgcaacacccaactgtgcgggcacatgcgcacagggacaacaggtggttttaaggtgtgtctggcaaaggccctggaggctattcaatgggaggaggaagtaagaaaattgttaaaagaatgaggacatttaaaagtcttgaagcgaaaataaagttaggcaaattctgccttttctgcctccacacctcaaatatacagatatgggacctgtatgcaaagatccgtccctactttatatggcaacaaaagacaaacaaacaaacaaacaaaacaaacaaaaaaacaataacaaaaactgtccttcaaaaaagaccaagtttcttttaaggccaaaaatctaaaaaaaaattctaaagagactgagcctgtaaaagagtttctatatatagcaaagattcagcaactgagataaaactctattttttctcctcttaaaaaaatggagatgccagaacattacctagacatgaacttctcacatttcaatgtgcgtataaatcacgttgttaaaatcttgttcagatgcagattctgattcagtaaacctgggttgggagcctgagattctgctttttaacaagctcccgggtaatgttgctgctgctggtcctcattgagtagcaaggatttagatcacctgaggagtgtaaatcaactctgagtgactcaatggggcttctgtgtttgaaaattgtaaaaataaataattcaaaaccaaagctgttgaaactgtaaatttttttcagccttaatggaatgtggccgtgtgcagaggctcacatctgtaaacccagcactttgggaggctgaggtgggcccatcacttgaggccaggaggtcgagaccagcatggtcaacatggtgaaacccatctctactaaaaatacaaaaattagctgggcatggtcgcacatgtttgtaatcccacctacttagtacgttgaggcaggagaattgcttgaacctgggaggcagaggttacagtgagccgagattgtaccattgcactccagcctgggcaacagagcaagactctgtctccaaaaaaaaaaaaaaaaaaaaaaaagaaatgtgattatgacattcagtcataagacagacagctataacctaggcagctgtaacctttgtttctctgattatagattggcctttactttacttacattgtttcgtaaaatgtaataaaggattaaagggcaccagagaagaccccttgcctcttcattgttggatcttcattatagattaacttcccttttacttcttttatacaaagacctcatgactatcacacagtctgaaacattaaatatacccttctaaactggaaaagggaaataaaacaagctgtaactaatcaaattgctgtaactcataaaccagccttgtatggaaaatattataatccggttaaatttctttgttttctgcctgtataagcaagaccttaacttttcagcttgggagcactgaccccattcctttggaatctgggttacttacatgaccattctcagctttgcacatgaataaacacttttaacctggattctgactctttcatttatttcaggttgacagaatgtaggaagagaatctggcagatctcagataaacagcaaaaggaagagagaaggtcctttgggtccctgtggtgaaggagtctatagtgacctgaattatgaaactgccccatagccttggaggttagagttcaaataggaggtaccattcagatttcccagccattactgagttgaaaactggtggcatcaactggcaccctgtagataaactgacacacgactgtaaacccagaaattggaagtgaacacttctctcactgttatacttgaatgggcatgttagaaggcatactgcaaattgttggaaggagagtcaacaatgagggacaaactagaaagtggaagaaataggtcagatgaaagttcaataacaaagcattaagttgagatggtatttggggtagtacctagtaagacgacttaagaaacatggatgaagctggaaaccatcattctcagtaaactatcacaaggacagaaaaccaaacaccgcatgttctcactcataggtgggagttgaacaatgagaacacatggacacagggaggggaacatcatacaccggggcctgtcagcgggtgtggggctgggggagggatggcattaggagaaacacctaatgtaaatgactagttgacgggtgcagaaaaccaacatggcatatgtatacctatgtaacaaacctgcacgttgtgcacatgtaccctacaacttaaagtataattaaaaaaaagaaaagaaacatggtatgactttctgggcttgtgtatctgaaggaaatggctctgaagtgatggctgtgctggtgctgtgaatgaacacctgatcatggtaccagtccacagtctggatgcttgtggtagagccaaagaattagaatttctctatggattgacgtttccaacataatacacatggatttaaacagttaaggcaaaagtgtttagcaacatatgctttcatgtcactaacctaaatccaccaggaaaaaaccccaagtggatcaagaactctgctctgtgatgatctctccctgacacattcagcacacagaaaggaatcattgctgatcgtttgtaacatgccaagaatgaaactgcattttgggatactttattttgctctcctccttagaggccaagagagaaattaaattaaagtccatagatcaaaagcataacttctcagctaaaaatgcagctacacattagttaacattcagaagaccaggccctttgcggttttgtgactttcaagttaatgtcttctcagccaatgcactaatttcctgctgatcctatcaatgggtcgcgtctgggaatcacagcacctacaatgtcaacagggagaatatgcagatgtctctggtggaagaggtgataagctccatcaaagtcttgatcctctcatcagaaaggctatcaccatttttcgtcccacatgggttttcccctctgtcaatatggccccgtgcctggtaaatctgcataatgagatggttttcataaatcacgtgcaatcaacacacagatttttttggacctctaaccaagactatatgtgttttaactagactgaatacataactctagtgaaataaaaagaaagtttgtctcaagcagagaaaagtcttcaaaagatggctgcaggagtatgcttccccagggagctaatctgtctgggttaggataagaaataaaatgattttgtttttcacatttttaaaaaagttcttgtggttgcaatatccaacaaaatgtactgttgactgcctcaaatggacagtgcatattcttccaggatgggcttggggactgaaaggcagaaggacatacgtgccccttccttcctggcagcaggggaggaaacggcctcatagaatggcagagagcaaagtagagcagcctcatgaaagaggccatggatgctgacatgcttgctggagaagatgaaagagatccagaaagttcctgtggccccttgagtgttagaaatgaaaaccaagtaaaaagtaagaattaagttgtctgctgggggctctccacagtgtggattgagggacctttagatgatggtgtcaaaggcattcgaaccagagtgactccatcttgagtaagggctagggaaaaaatgaggctgggacttgttgggctgtgttctcacaaagttaggtattcctagcctctaggtgcttactgttaagaaaacagattgataacatttactaaacagacccagacttaggagtgtcctgatatccccataccttgagaacagaagcattcttaattttgctttaaaggtaataatatcgattcttacaaaacatagtaattaagaaaattaatcctatatcacaaacccatgtagcacaacacatgatcttttgatatatatatatatctatctataaactagtattgtacctaaggtggatgcattcctccccttacttttggcaacgccctactctgtctatggagtagctgttctttattaataaagctgttctttcttaataaacttgcttttgctttgcgctgtggtcttgccctgaattctttcttatgtgagatccaagaaccctttcttggggtctggactgggacccctttctggtaacatcactagccagttatagacaacagtagtaatggggtggtgtggaggaagggagaccttacattgactatacccagagaacagaccgtgagctatatcaatgcaggaatattgaagagtgaatgcaaatagggcagagggcaacacgcagatacacaataggacatgacatctcaatgaagataggtgagaccggaggaccaaatgaggaccagaagccagggaaaagtccaaggtccctcatgcaaaggcacgagggcacacaacctacttgccttacaccagagtgctgtgcaagaaaaggaaggcagagggaaagtagatctgggaagaaactttccccagatgacagtaagtcaccagacagtggcaggataaccaggaagtgttcagttatacataataggcaagattaaaccacatttccaaaatctctcattatcccccttcctgacccttcatcagtcaataaaatagggctcatgaggacattcgggtcagttatacagtgaaggggaccaaaatatgtcacccaaatatacttctttggcatatttcaagatggctattccgaaaggctgcagacagaaatagtcttgcaaagctgccttttgtgctgcgagatttgcatctgtagagaaaatctacattggtgaaataaacacccaggctctctctgagtcccccttaaccagctctaggaaagattaactcacagtaaaaggagactaaaagtctgggacttttaaaggtctagcagagaaacttttaccactggctactaactgttctttctaatggctgggctgctacccgtgaggtttcatctgcataacaagatagcctttgcttgcaatgcattcctctctcactcttacataacctgtgatgctacctcctcccagaagccctaagcccctactcttctgtaacttcaggctggtataaaaatgtcagccatctgacccctcctttttttttttttttttttttttttgtgaaacggagtcccactctgttgcccaggctggaatgcagtggtgtgatctcggctcaccgcaacctccacctcccgggttcaagcgattctcgtgcctcagccttcccagtagctaggattacaggtgtgcaccaccatgctcaactaatatttgtattttttctagagatggggtttcaccctgttggccaggctggtcttgaactcctgaccccaagtgatctgcccaccttagcctcccaaagtgctgggattacaggcatgagccaccgcacctggccctgatccctgcttcgagtctcacactttgtgtatggctcctgtgtccacatgaatgttcacacatttgaatacctttttcttcctgtgactatgtcttttcttccaaaggtgtcccagctaagaacttgcgagggttaagaaaataaattatgtattttttctccccttcaacagaaataaaaagatgtaccctctgctagtgtcgtggtgttgttgtggtcaattttaaacaagctgcactagggatctgaaagggcccctcctccatttcatagctcagaaagcttgactgttgccttcactctgctggtgagaaaattagctcagcaaatatgtctcttcccactcaggcaaagcaaaaagaaatgacccctgtcaaggaatttaaaaagctgttacctaaaaggggcacaatgaggacattacctatctccattgtcttagtgttaggctacataattaaaatgactccaccatatcatgttcgtaaaagacataatgacaggaggggacagagcaaggtaatgtcgctcccaagagtcagcatattaatggggcctttcagtttgataatgtaattaaccttcttaaatcctactctcagtaaaattccaaggagcagaagctacaagaataatgtccttttcaagtaaccttactagcatcagggcattcacttgagaaatggtggtgatggtcaattcctgataaaagactttaaaacactgtttctaaaaaggtctgagctgccaaatatcagattcacatgaccaagcctatgttttcatcttcttctcttgatgaaaataatttctcctttctttcacaacctttcattttctacattttattgaatttgaagtcttgaaatgcaaagactagagagtcccatggtcgattctataaaatccaaatcatctccttcattggatgctttatgtctacaaccagccttcaatacataaaacatgagactgtccaacaaccaggtggcattggttagatagtatctctatgtatttacaatattattcttttatgcaatgttacttaaaggccaaattttaaacattaatagttcagacagcacttcaccagttttaaatccactggactgaggcactcaatgttacttgtctacaggtatctacagaactaaacttttgcaagctctctccagtcatttcgactgtggcccaatgatgtcacaggactgttgagacaacagaaatcactggatcagtcatgtaactaaccagtcattccctaaacatggaaactgctcaactcatttattatcatcctttgaatatgtattatgttccaggaagcaccatgatccttaccaagagggaagtaaaatatttccataaatatctacagttaaaagtttccatataagtggtagaaacaactatgaaaatcttgaggacgaatacatcattcctggatctggtgatcggaaaaggcatttcagctggccatgaagaataggttggtttccgtcagactgagagacgagactcttacatagagaaaaggattctccatcacttacatcaaaggaaaaatttttcatgggattgacaagtcatccagttcagcctagatacagggaaatagcgtgaggtaacactaaaaaagttgccaggtttcagaaaaccccttcagtctccagtgtgtttatgggcattgaatcacaaattgaaaaattctcccatttcatattcacaattaaggtacttctaaatctaaagttgcacagtttcaaaaagctttagttttcatctccaggctgtcaaagaaagtccaagatcttctaagataatcctttggaagctgagaaatagctataacttccaatgacagatttttattgtacccgaaatttcaagtttcattatgttcatctgtcgtgtactttctgggctaattgttctgctgtagcttagaacaaaaaatataatgcagaaactattcaataaaacctctcattttcacagttagggttcttaccattttttcttggttgctaatgttttcaatttggccatttgtttaaatttgcaatttgttagtaatttgcgtaacttaaacatctaatatataaacctttaacctattgaccattatagcttcatttcatagaagcatttataaacaaagtacatactagaagctgaatttgctcccccaaaagtttacagtcttgtgcattttagagtaaatgattggtcttgtactgattgatggtaacaaataaatgtcaacctcaattttgtattccaattttaacaaaattttggtacattgcttttaccattactatcaagtgaatttatgtaagttaatctaagaaatggcaatgatattttaggataatttcatttagatattttattcttttaaaaactaagtatattctctttccagtgatcaatataagataatatctattataagaatcaagtcagatcaaagtaaggcattgacttttttctgatctcccacattttagttgcctaaattgaatatttaccaagttctgtggcttgcactgcagaactgcactacattaagataactcccattaaacaaattcactttagtgtgtaatttaatcaagctatttgttcagtttgcaaccaggtcttaatttattgtttaattcagaggttactagaaaaatgctcacctaaaaataattaacctagaatctggcaaacttaccttataagaatattggcagaaatcctgtgtggggtgtgaggtacgatgggataacatggatgtgaaaaattatgaagatttggagcctgcctcacaccaaaccaggtttaaattccttagaaaaaattttacataaaaactcatgtctgggtgcggtggctcacgcctgtaatcctagcactttgggaggccaaggtggtctgattatgaggtcaagagaacaagaccatcctggccaacatcgtgagaccctgtctctactaaaaatacaaaaattagctgggtgtggcggcatgcacctgtagtctcagctatttgggaggctgaggcagaagaatcacttgaacccaggaggcggaggttgcagtgagccaagattgtgccactgcactctaacctggtgaaagagtgagactcaatctcaaaaaaacacaaaaaacaaaaatcaacaacaacaaaaaccaaccaaacaaacaaaaaaaaaaccccataacaacgtgagaacaaaagaaaacaagtaccagaaaagtgaccgtgtaatctatatcaatttagggagagacctgggactagagtactaatgtctctactgtaatacttctgtcatgtagcatttatcagagtctaaatttgaagtgggtttttttggagacagcatattgtggtctaattttttagtgcaatctgccaatctctacctttatgtggcatgcttatactattcacatttaaattgattattgctatattcagataaaaatctatcatctgtccacttgttttctactcattgcatttgttgtgcattttcctcttcttttactgccttccattgatttacctgagcattttatatgattctattttatctcctcttttggtgtataatttatgctgatttttataactttttaaggagttgccatagatcaacaatagatatttttaaatgatctaaatctatcctcaaataactctgtactcgtttattacaagtgcaggtacctaataacaaagacttcctaattcctcccttcccttgcagcattgctgtcattcagttcacccgatacattgctactactattgctttaaatgaagttatattttagattaattaagtggattgcttgaggttaggagtctgagaccagcctggtcaacacggtgaaaccccgtctctactaaaatacaaaaattagctgggcgtggtggcgcacgcctgtaattccagctaccagggaggctgaggcaggagaattgcttgaactcaggaggtggagttgcagtgagacaagatcacaccactgcactctagcctgggtgacagagcaacactctgtctcaaaaaaaaaaaaaaaaaaagtgagaaaaagaaaatatttaactttaccttcaattatgccttttttttatgttgcttctttgtgtatatacgagtttagtctttatttctctgtcacctttgaaacatgttagccagacatagaattataggttggcagatttttctttgaatacttcaaagatttttctccattctcttcttgattgcatagtttctggtgaaaagtcttctgtaattcttatggatgttcttctatagtttaagtgatttctatccccctctggttttctgcaagattttatccttttcttgatatgttatactgtagcttgaataggataagcctaaggtttttggttttgttttgctgttaatcctatttacccttttggtattttatgttgtctatttttttcatcagaggctttaacatggtaatcatagttattttaagtttcctgtctgttaattccaacatctgtttcatatgttagtcgggttctgatgactgctttgtctctctatttctttctttatttttttgaggtggagtctcactctgttgcccaggctggggtgcagtggcatgatctcagctcactgcaacttccatctctcaggttcaagtgattctcctaccttagcctctggagtagctgggattacaggcatgcaccaccatgcccagctaatttttttttttttttttttttttgtatttttagtagacacggtgttttatcacgtggccaggctggtctcaaactcctgactcaagtgatctgcccgcctcggcctaccaaagtgctggcattacaggcatgagccaccataccctgcctcgccttgtctctttagactgtgttttttcctcatgttttcgcatgccttgtaattttttgttgaaagccaggtatatcatatcaggtaaaagggactcaggtaaatatacctttagtatgagattacctttatttatctggctagcagttgggtcatgtctaatgtttgttgcagctatagataccagaggctttaaattcctctagtgtttgttttgtttttgtttttgtttctatttttttgtcttttttcttgatttgggggatattcttggtacaagtcttcaagaatgtgtcttgcaggtctttcagctgtaatacattgttactatactggaggcttattggtgtgacggtaaggtggagcggaggtggggggcattctataaacttctgcataagtctcatttagtgagactttttcttggggctgtggccttcacaggtgtttctgtccctccctcctcaaggggtagaggtttttcctctactttccctacttccattcatcgcttcagtgttctcaatccatttcctggatgtcatataccctgataattaggatttttcctttttctttaggtgagatatgctcaagtggggcagaattccacttcacaagctgggataaggtttcaaaattgccctcaggaaaatttattcccctggggactaggcctttgttaggcacaaagtataggacacattctctttcctttcccctgcgaaggccatgaggggatttttctcagagcctaaccatgaaaatctggtgctgtttttaaagggaaagcctacaatatgtgaggctatcccatgaccagggcccccaggagtgactcactctaatgctggtctgccctcagtttccagaaattcatcacatttactatttaaatgttcctgctaacttacggtgtctagcatcttcatttaaatgttcttactaacttatggtgtctagcatcttctgctccaagtaaacaattctttctgtactgtatctctctgaaggagtctgttgctgcagacttttttctttttttagaagaattataactttattttatttatttatttttttaaattatactttaagttctagggtacatgtgcgcaacatgcaggtttgttgcataggtatacatgtgccatgttggtttgctgcatccatcaacctgtcacctacattaggtatttctcctaatgctatccctcccccagctccccaccccgcaacaggccccagtgtgtgatggtcccctccctgtgtccatgtgttctcattgttcaactcccacttatgagtgaaaacatgcggtgtttggttttctgtccttgtgatagtttgctgagaatgatggtttccagcttcatccatgtccctgaaaaggacatgaactcatccttgttttatggctgcatactattctatggtatatatgtgccacattttctttatccagtctattattgatggacatttgggtcggttccaagtctttgctattgtgaatagtgccacaataaacatgcatgtgcatgtgtctatagtgttgctacagatttgaaaatgatatgttgacctatgacttcagttctctgatgggtagaagaaaagtcattgaattttggtttgtccagatttttcttgctgtaacaaagatttccaagtgatgacttaaaaagagtgatgacttcaaaagagtgatgacttctaagttctttgcatattggaaataaaagtggaagtctcagctcttctaatctgtgagaatgttagcaagttactaaatctctatgtgcattagtttttatcatctgaaaaaatgggtataagatgccttacctaatgaagttgctacaggggataacttctaaaaaacatctactgcaaagtctggtatgaagtaggggctcagtcagtgctatttgtctaataaaacacgcatgtattcatttcctagggctgtcataaaaattattgcaaacttggtggattaataaacaggagtttattctctcagaattctggagtctagtagtccaaaatcaagatgttgacagggtcatactcccttcaaaagctcttgggaataccctccttgccttttccagcttctagtggctgcagacattccctatggctacataactcccatctctgcctcagtcttcacatggctttctctgtcttctccttctaagatttatggcccacccagataatctaggaagatctcatcttgagatccttaacttaattccatctgcaaagatagaattttccaaataggtcacattcacaggttctcaaaattaggacatgaacatatttttttcttttttgagggaaagaccattcaatcttctataatgtattagttaagtcagctgttgactgaaccaaactatcagtttggccaaacaattaatcttaaagttccatataaacttctatattgccctagaagaatagagagtagtgttttaatttctttgtccaatagaatagattccacaatacaaccatcagtgccagacagtcaagaaaacatgatctactgtatcaacttactgtttttccttcaaggggatcacaatattttatccacaaaagcaatttgggatcattcctttgaatagagaggaagcaaataatatggttcttatgttgtaaatgggaaattaagacagaagggtaatccagttaatgtttatggtttaattaaaaatgctgacagaaagactcacgacattggtagaacttcttattagtgttgtcaacatagctgtactgcctcatcttcttattttctttctcaaatttcaatctccagaaccaaagaagctctattttgcatgcatcagtaacaatgagcaatttacacttagcgatcctcctctgtcacacaacagcagctgtctgtgagtcctcattctactgtgagaagcaggtttgctgttttattcctctcttattcagtgcatatgcaaggggtggggtggagggctgggtacagaggacagcaaggagacaataatttatcatttccaaacaaacaacaaaggttgtttcaaaaatccagcttactgtttttattttcagtctgtaattcattttcaaaatgtttggacataaccctttggctttgcttctgagcatttacatgacatttagacagtgaacacatctccgattggtgcacagctatgggcatatggcacagcttactggaaacacggattcacaagaatacgtatccagtttcagaataagaaccaagtatttgctgactgagtgtcatgtggactgttttaaactccctatccataactttcaaacctactctggggggcggtcaaggggaggaggtggaagggtagactgttggctggaatctaatgcctttcctttactattaaaaatctatgtgaaaacattcctaatgggtatggtaatataccactttcgtaccttataaaaacctatttacttagtttactcagtttacaagctgagatttgaagcactaaccactcggggtcctatcttgatagccctggcttacttaccaatataggagaatgtgttctgttcaacctgagaaaaatggtgggagaggaccagcagttgaacacctggcccatctaaagtgaggatggtaagaatgataaaggaaggtgaccagttgcctcctgggttctctgatcactgcatgtttagctgtgcggttaagacagcagatttaaacgcaatacagggtcctacgatgacaatattatctgccattgattgaaaactgattatatacaagggggttactattcaaaacctcattattccttataatagccctattaggtaggccttttcaatctcacatcatgtattaaaaccacctttgcaaaaattataactgataaaattattacagtgaaagaggtctgacctaaccaacttggtcttgcttttaacctccaagctgtccttgttcattcctgggtgtagagtgaactaactttgggagcaacgcagtttagagtttaactttgaaacataaaataacagtcctttcccgcaaccaaccctcttcttgcctttgttagactgcctttgcagtactaacaaattagccagaagactagaaattatagtttaggagtcactgttgtaaaacctgagattagtgtttgagatactttgcagagtctacattctaatgcaccagctgatgccacccagatctataaactgcctcatctggtcttatggcccccatccaggaactgactcagcgcaagaagacagctttgactccctatgatctcatctttgacctgtccaatcagcactcccgactttctgacaccctacccaccaaattatccttaaaaaccctgatccctgagttttcaggaaaattgattagaatattaactccatctccaacatggcgtggccagcatcgtgacacttaagctcttcctttactgtaatgccatggtcttagtgagctgattttgtttgtgcagtgggcaggaagaacccattgggtagttgcaatatgatcaaagtgaggcttaaaaggttaggtaacttgctggtggcctcactaaacctcactaactccatgctccctaccatggagataccactactaataattaataataactaataacaactattgttgttaaaatgatactgggtaaaatcatgtaaaataacaactatgagatatagttgttataatgattaaataggtaaaattgtgtagaataacaactacagatatagttgttatagttaaatgaataaaatcatgtaaaatttacaatcgtgtaaaataacaactatgagatatagttgtcataatgattaaatgggtaaaatcgtgtaaaatgctgaccaaaacagccttaacattttcctcagtttgactaaactttagttcagcttcttctggactcaggcccctgaactcccttgttttagagcgcttactttagaaaactcgtagatgtacattttctctctgctcctttaggtgtaaatctttttaaaagcctcttgccagttttgtaacccagcactgtccttctcaaggacctgagaaccattcctttgaaaagtcatcatcaatgaagacagtgcttcccagtctcccagggagggcacaggcttaaattgtcctagttgtaaaactacctcctgtcacaaagatatgagaaaattaactttgttttgggatcacgccaattggcaaacatggatgccctgtgatacgccccactccagttcttgaaactctaaaaactctaccatcctttattccttgagctctgtcttaattctgatttatcttccctaatgcaatagccttaaataacatcttccttgcctgtttacattgtcgagtgccatttttgtttttacaatgcttttcatattgattgattgattgattgattgatcaagatgtagtttcactcttgttgcccaggctgcagtgcaatggcgcgatcttggctcactgcaacctcagcctcctgggttcaagagattctcctgcctccacctcccgagtagttgggattacaggcatgcgccaccatgcccggctaattttgtatttttagtagagaggggtttctccatgttggtcaggttggtctcgaactcctgactcaggtgtggtcgacctcctgcctgccttggcctcccaaaattgttgggattacaggcatgagccaacacatccggctgacaatgctttttaataactgtttcaaagatgagaaaacagaagaacaaagaaataagctaatttatccaggactgtaacccaggccacctagctttggcggtcatgtctgaatcatcatacttcaaagggaaataatatattcacacagtgataaggaggcatgtgaagcctagcaccttcacttaacaggtgctcaaaagctggaagctgtgataatggagaggaaggaggaaaacaggactcaggacaagcagatctattttggatccaggcaatacctcttagtaatcctgtatccttgggagatcacagtaatagtacctgagatttgtgcttatgctatttccctgcagctgaatggaagtacaagtgttctcattgcctaggtgggttttgcacccactcttgattatccagcaggaagcacaaacatctttgaaggatgatgagctagtataccagtgacattctggaataatatctcattatattattattaagggcaagaaagaaatgtgaattgactcttttaaagacaatcaaatcaaatataaatgtcattaaatagacttaaggacgccgaatggaagaataaattatggagcagaaagtcaaggttagtcacagaaactaacaaacatagggagaacaaaggaaattgtggagagagatgtatattgatgctcaaaaagacactgcagatcattgatttgaaatgcttatgtattaatattaactggggataattcaggcctgttttgtattgtacccagattagaaaagcagatgtgattctcccacccctttatcaagaacgagagtaagtcaaagagattgctgattgcaaattaaaatgttaatttctatccattttaatttttgataaattcttattgagagctactaattttagaaactttcaagtaccgtaatagctttcagtctattgagtccctgggaatttgcctttggggccaattgctttctgcctccattatgaagaaatattaaatgctatcaggaagcgcaaaagccacccttggtagagagacaaatttcaatttatgaaaggcaaagtattttaggttatgtaatatgctctccagtgcaaacaaggagttgaggatactagctttcaaggaaagtacaaaatacacaatggtgttgaacaggacaggtcagtggttagcagaagtagtggcagcaacatcagtagaggggtagtgtggtaattagatagtgctatctaagctttactgaatgcttattaagttcttatcacagatccatgggctttatatgtattaggcattttaatccttacaaaaattattttagatattatcattatctctggtctacagccagggaatataaaacaaagagaagttcagtcatttgtccaaggtcacagagctgagaagctgagatctgaagccacattgtgaccaccacctccagattcaagctctaactacttggcatgcctactgcctaggggctgtgcagggagcttttcatattccacattgctgagaactgatgaaactaaatatgggggagggaagattgtctttttgctttatctatgcctcaagaaccacagagatgaaacatgtacaaaaatgggaaattctagaagctttttttttttaatgaaggatattacagttcataagaacaaagctatcacaggaatcattttcaatggattcagttacctgatgaaggtactgaagggaaatgcagaatccaaattatctaacagataattcacaaaatatgattgacagtggactcactttctggaagttagagcaggctggtgctaaactgaatcataatggaatgatatattccctcaggtgaaatacagtctaaatcttcatgctgttcgtgcagcacatagcattaatagaacatagtaatgtggacatactttctaaagcagcaatacaaatgtatattggcaaattgtctctttaatatattgtttaacttctccatagcactcaacacaatgtgtataattaactgagcaattatttatttagtgcctgcttccagcactggaatacaagctctgcatggtcagcaactacacatttttcttattatattttgccttcccagtgtctagtggtgtgcctcacacacagagggaactcggtaacatttgttgactgaataaatgtaaggtattttctacataatgcagacttgttaatttattctgctattaataatttattgccgggtgcggtgactcctgcctgtatttccagaactttgggaagccgaggcgggtggatcacctgaggtcaggggttagagaccagcctggtccaacatggtgaaaccctgtctctactaaaaatacaaaaattagccagacatggttgcacatgcctgtaattccagctactcgggaggctgaggcacaagaatcgcttgaacctgggaggcggacgttgcagtgagccgagatcgcgccactgcactccagtctgtgtgacagagtgagactctgtctcaaaaaaaaaaaaattattgagtgctgtttatctgccaggcactacactgggcactggacagctaacagtgagccaggcaggaagggccatgctctgggggtacttacattacagtaagagagagacacaaccttgagcaatgcataaataaaatcattctagatattgttaagtactgtgtgaaaatcaaagagtctggtgagtgagagggactacttggtgagcggggtttggggcatccaatgttaaactaagtgggcttagaggatctctctgagtgatcataagacatccatgatgtcttcaaaggaatcaaaggaaagggttttgtacgcgtaagaaatggtaagaggagaggtactgaggctagaatgagcttggcatgttttaagaaaaaacaaggttccagcctcagcaacataaaaagaccccatctctaccagaaattaaaaaaaaaaaaaaaaattagccaggcggggtggtacgtgcctgtagttccagatgctcaggaggctgaggcaggaagatcacttgagcccagaagttccagtctgcagttagctatgattatgtcattgtactccagcctgggtggcagaatgagaccctgtctcaaacaaatacaaaagaaaagaagaaaaaaaaaaagaaggttcatgtggagtgtggtggcagggagtggggagggaaactggaggagaaacttgggaagtgagcagagattctgtaataagatcctgtaataagatcctataataagaaagattcataataagaaattcgttttaattctaactgcagtaggaagttggtgagtgatcttaagtaggggaataatgtgatgtgatttgcatttttaaaagatgactttggctgctgtgtggagaatggcttgaggaagaagaatgaaagccaggagacccactgctgcccagggtgcgtggtatatgtactccaggggaaagatgctggtggcttagcctagcgtgatgaaaagggagatgagaatgagcctggttttgagattcttctagtgacagaaccaataggacttgatgatgggtgaagcgagggaaagagagacagatggaggagagcctaggtttgtatttttacaactgcatgagaggaggagccggcagttgagaaggagaagtatggaggaaaaacaggtggagagaatgggaatcaagaattgggttttgtggaacttaaatttgaaacacatattagataaccaagtagaaatgtctagtgtgtaggagaatatagaaatactgaagtaactagcatctagatggcatttgaagctacaggattatactacctgtgacaggaaatatgtgatttattaatttagtgcaagtgtaggctagctggctcgttttgaattaagatgagaggaaatagctttaccttgtggaaccactggagagaaacgtgtatcagctctatgagcatgattactgggcatcagccatgttgagtgctggacttcagaaaatgaagatcgggacagcagaggaccaagaagccagtgatgttcactaagcaggcaccagccttccctccctttcaacgtttggatgttgtagttacataaattcctggccacatagactcaaccatagagttctcaagaggatgccgatggatagagttttgaattggattgggaatccaaatcaaaagtacaagaaatctgcttgtgaattgaatttacctgacagtgtcaacattaagttgtctgctaggaaagagtttggaactcatattcagtttgtagaaatacatacaattatagcttgtgcctatccaaagctttactgttgcaatggtattatgcagtgagggaggacacagaggtagagacaagacgcacagtacacagccccaggccactgggttcacttcatcattagtttttgttggagaaagagactgagatgccggtgaaacagggaggaggagagccaggagagcacgggatgaaagaagcccatcaaagaacgtgtttcagctgaaagatgctgctgaagaggcaggcaagatgcaggcagagcaatggagatcagcgagggcccagggaggcgcagggactggagctgagggcacagacacccttaggataagttgaaaagcaaaggacaagtcgagacacaaaataatcagcaacaatattcttatgcttgagaggatcaccatctgggtagtgaggcaggatgagctacatcataatgacataaatcataaaaccgatgcgacgatgactaccaaggccacctgttgacacagaagacccaaagggaatgcgaactggggcagccagaaagggcttcaaaagatactgtgttcctatttcgaagaaactaagaataagatgaatggtgagaggaagaaaggatgttccagccaagagattggaccaacgtgggcaggcgggagaaatcaatacgattgaagaggcgaaaatcaaagggacaaagagatttctggaggctggctcggtagggttgtaggttgaggctgttgatgtaaaaaagaaaaacaaaacaaaaacagaaactagaggaagtcactctataaagcagaacaaatccaagaatttcctgacacaaaattaccatggggggagggggagggaagtagccatctagcaaaatacattacacccactttcttttagcttcaggcacagccaccaatacttattttcagcacccttttataaaaatttaaaaccccatgtaattatattcattcattttaaacataacccctcgaaatctagctttgtatttaaaaagaaaatctgacgtggggtttggaatcatggttatagatgaatttggtgacaagtcaaacattttggaaatgagtttccacacatctgctaaagaaccttttgttgccctttgagcagaatattctgggtgtagtgacatgtgcaaaataagaaatttaatatttttaagccttcaagatgaatgttacaacatctgaacaagaataaatgccatgcttattcaattaccttgcatcccagggtcttatttaccatcagctttctcagcatgccgatctatttactgctaaattgaataattccgcctaaaggagataacatactcttactgacagcttgtccctaaactcccagatttcacaacatcagtacacaaatatacaatatagaaatggttgcttatgtgcattagatctgatgtaaacaacagctgccaaaaagactgaattagcctgatcttatttcatttctcttcttatttcatttcttttcagtgatatttgcctttttaaaaataatcagttgtggcaatacgtgaagcggagaggcacagataacaggcacctccattacaccaatgacggttctgcagtttttcctaaagtctttctagaatgacgcacaacacattatagcttccgtgtttgctcaagattatttgattaaactattacactgagagtaaagattactctttttaggttgtcactttctcactgatgcttggcaatttacttaagggaataagctaggtgtaggtttgcaccccttgctctatcaagacaatggcaaatattgattggtagtaagtaaggcttagacgtggtttcctttttcttttacatcagccgtgggctgttgagatacaataggtgcagccaaaactgactgataaatatggatttctaccctcccacagggcttggaataatgattgagttgctttgttttttccagaacttatagcatatatatatatacatacacacatacatacacacacacactatatacacatatatttataaaatatataaatatatatgtgcaatatatatacacatatacaaacatatatgcatggtatgtatatagatgtacacacacacacacacacacacacacacacatccttctttgatggctccacttcccatccaattgctcaatcccaaatctggaattgccttgacctatctctcttttcctctgttactcaaagaaatcttaaaacttggctcattctcatctctcctgtcgaccattctagtctcagccactatcatctctcccctggactataccactgcaatctgggaaccagtgggtttcctggcttccattcttcctcctcaagcttttctctgtatagcagctgaagtaatcatttaaaaatactcctcttaaaaaaatcctccccacatggtattacacatggaaactgacagtccaaggctgtgatcaggcgatggtaggctcaactgggccagtccaagtgacatccctttgaaaggagcatagggagtgccctgccccaaaacaccccccaacacaaaacattcagcaacttcttttaaaaattatttgtataaatttagggagtacaagtgcagttttgttacatggatatattgcatagtggtgaagccccggcttttagtagaaccatcactcaaattaggtacattgtactcattaagtaatttctcatccttcactccccttcctgcttcctcccacccttccgagtcttcaatgtctatgaattctatagtcttgtcttcacactgttttgctcctacttacaagtgagaacatgtggcatttgacttcctatttctgagttatttcacttaagacaatggcctccagttccatctgtgctgctgtaaaagacattattttattatatatttttatggaccagtagtattctgttgtatatattatagtataccatattttctttctccagtcattccttgatagatgcttaggttgattacatatctttgctgttgtgaattgtgctgtgataaacatacaagtgcaggtatcgtttttatatagtgatttcttttcctttgggtagatgctcagtattgggattgctggatcaaatggtagttttattttttagtactttgaaaaatctccatactgttttccatagaagtactaatttgcatttccacccacattgtataaacgttcctttttctccacatcctcgccaacatctcttatttttttgactttttataatagccattcagactggtgtaagatgatatcttattgtggttttcatttgcatttatctgataattggtgatgtctagcattttttcacatgcttgttggccatttttatgtcttcttttgaaaaatgtctgtttgtgccctctgcccactttttaatggggttatttgttttctttgtcatcgttgattatttaagttcctcgtagattctagatattagtgctttgtcacatagtttgcaaatactttcttctattcttcaggctgtctgttcactctgttgattatctctttttctatgcagaagtttcttagtttaaatgaatctcatttgtccaaaatagtttttgttacttgtgcttttgaggtctcagtcatgaattctttgcctacggcaatatccagaagagttttccccaggtttacttctagtatttctatagtttcaggtcttacatttaagtctttaatctatcttgaagtgacttttgtatatggtgaaagatagagatccagtttcatcctcttgcatttggcaaccaaattttctagcaccatttattgaatagggtgtcctttctccagtgcataagtttgtcaacttagtctaagatcagttgactgcatgtatgtagctttatttctgggttctctactctgttccattgacctatgtgtctatttttataccagtaccgtgctgttttgattattgtatccttgcagtataatttgaaatcaggtaacagtgatgcctccagctttgttctttttgcttaggattaaatttggctatttgggttcttttttggttccatatgaattttagaattgttttttctaattctgtggaaaataatgttgggattttgataggaattgcattgaatctgtagattgctttgttaagtatggtcatttaaacaatattgattcttccgatctatgagcatgggatagtttttcatttgtttgtgtcatttacttgtgtcaatttctttcatcagtgttttgtaatttccctctcagagatctttcacgtccttcgttacatatattcctatttattttattttgtagttattgtaaatcagattgacttcttcatgggttctcaacttcatcattatttgtgtatacaaatgctactgatttttgcatgttgattttgtgttctgcaactttacttaattcattgatacaatcaaatagtcttttggaggagtctttaggattttataggtataagatcatattgtcagcaagcagagataatttgatttcctcttttccaatttggatgcgttttattttttttctcttgactgactgctctggctaggacttgcagtattgtattgatgaattcttcttacggaaaagtggaagttctgctatatcaaaaagaaaagggggctgggtgcggtagctcacgcctgcaaccccagcactttggaaggctggacagatcatttgaggtcaggagttcgagaccagcctggccaacatggtgaaaccccatctctactaaaaatacaaaaattaactgggcgtgatggtgcacacctgtggtcccacctacccaggaggctgaggcaggagaatctcttgaacccaggaggtggaggttgcagtgagccaagattgccccactgcactccagcctgggtgacagagcgagagtccatctaaaaaaaagctggctgggggagcgggggaggaaagttccataggcaaaaacaataagtctctattatatattcatgatgaaattctcattggtccaaaatgaaatgaaaaatataaaaatgatatattaaaatttttatacaattcattatgagtttttatattttatataaaaatgatattttgaaaatttttatgaggctaaatagggttaatttttaaatatttattttttactgccctttactattcttttttagttttggtgataaaatgtcctttcatttaatatgttatggtgatatcagtttacagttatctttttatgtctttacttggcaaagttaggttaacaactctatgacggtttcctaatatattgtttaaatttatttgttcacaatatccaaacctttgggaatccttaatctagagcacattttaccaaagtgccacctaaattgcagttggaattgcttgcaagaaagaagggtgggagaagtttactgtcgaatatactcaggatgctgagataagaaacttaaaaaaaaaaggaaccttaccacagaacttctcacagccttaaacatgctgatgtagatggtgaatccccaaaatgaagatacagtatacagcatatcccacaattatttgaccaaggaactcttgcacgaagaagcatcttagagacttgtcctggaaagtgttaatctagagactcacaaaatacttcaacaaatattgaatattggctggcaaatagaaatgcataatgacacttctatagaaagaggaatccaagggacataaaagaaattaagatgagaattcagagatttgtgccatgtcatcctcgactacagccttagtattttcaacttactggtttcttagcttggtctgcatatttgtgaaagaataagccccattcatacgcttatattttcccaaatgactttgaaatgtcaagccattgtatgaatttgaaacggcatctttagacctttactgaagttatgttactgttgccggagtaactaacaagtatcacagggcaggggaaggcagaaaaatatcctttcatttatcaagcactgaataaagcaagaggcttagaaatgtgcgatggaacacgatgttacaaagctattgttcctgtacctgtaaataaaaggtaacaaggtccatttgatgacaaagagtcatgagacagctacacagctcctcttcaaaaggaaacaataaaaacttttaaaaataccaaataacattacacttcttgctctaaaagtatgctggttatataacagaatgcaagtagatttataattagcacttgtttatagatgtcttatactgtgtcatgcatggaggggcaaaagaggttctgatggctattcattcagatagaagttatcgaggccataggaagtgagagcgccatcatactaatgttaaatagactgaacaatgggaaatttacaaccagcacaaggatgaatcagttgatgaatatcacattgttgatagaaaacgattttgagagagtggagcaaaacttatttaggaagttagaggcatctctcctattctcttcttccaaccctccacttcttctcgtatttaagattaatagataattagggtagaatggatgctctttaaaagagaaagcactgaacaggagagattgtgaaggttttttcatgctgtggactcaggatgcaagaggggctgtaactctcaggatacaatgagaagaggcatcatcctttctggggtaacatttggcagtatagagctagaatagcaacattaagggtagcaagattaacagcaagaatacagggatcagaaagtctgaagctcgaaaatgctctgaaatcaagtgaagtgatgtaaagggaatatctaagttcatttctataatttctaggccagatagtttgttaaaatatggaagaatgcagggatgcaaaatttctccaggtatataaacagcataaggaagtaaaaaaaaaatatagtactctgagataatttcaaggaaacatctataggaattcggagaagggaacatcatttctggttgggataattatgaaacatttcggaactgggatatagctcaaaatacactcaaaataattatgtggtgggctttctcgatgacatctctcagagtggctgagaattctaaggtgtgtcaaaattctgtactaaaatttatggccaaatcaacttatttgatcaccaatactgccattgccatcagcatcaccattaccaccccaacactgctatcaccatcattactaccaccacttccacccttatcagcaccactatcaccattatctccagcaccaccacctccatcaccatgaccatcattatcatcatcattacagctaacagttatcgaatgcttactgtatgcttaacaccattctaacccctttacatgaataagcaaatgtaagctttcttcaaaattccaggtgaaatgctattttctctggatatgccccacttcgttgaattatcttcccttcaatgaaattttctctttctctgtaaagttctttaatggaaaaatcactttccacattatactatagatgtaagttacttatttcccttctttaaggacagattatgcctgattccacttcaagcctctcaaagtacccagcccactccttactactaattgctcaataaacttatttgtgttaaggaacaaataaaaagataattcctacggatacaatatttttaagattgactctcattttggaatacaaacatgacattgtatacaaagcaagagtttagttaccttcatccatgtcaaactatgtctttaaaattcacagaaaataaaagaaagacaagttacacataaaccttatgtcagttgtgatgcaaaaatatcagatgatcatttacacattgaaagaaacacaagtatagaatagttgcattatcaaatatttctacaaaatattattgatttataacagattttattcataagtcctgccactgctggtataaaggcaaagaaatatcatgtaggaaatatttcggctgcagttgttggttgcttgctgtggtggtggttgttggccttagctacatttattacatccaaaatatagagcagcgccaagatctgtctaagtcccatgcttacacaattagcatgcttctcattctaaaaatacctttgtccagtgctgtttgagaaaccagcagagtttttctaataatcttgttaaattacatgataagtaatccattgcttcaccttacaaagggatagttaggaacaaggattagatggtttgcctaagtatgttgtagtagagactagctgaaactatcttcttggatgcataggctgcatatgcctagcttgccgtgcagttagatggggccacatgactgagtaccagccaatgtaaggtgaacagaaatgtttagtccttctctataaaaaacctccaaggtgtcaacctccagttatttttgcctgttgcactccactaacaagaatggtgattgtgggagctacatacttaagttgaaaggacccacaagatgaaaaaagcttgagcccctgagtcacaacctggaagagaactgactagggacataggtttaagactttatatgagtaagaaatatgcttctgtcataataaatcattatgatttgaggatttatctgttaaagtagctaaggtatattaactaacatggacattattatcttgaagtggaatgttgctctaataaaagccttcaataggcttagtcgttatggagtacacggctaggaaatacgtatcagaagctggtaagatagagatgtgttatttggagacaaaacatttgttaagtctatcatctgcaatacatgttcctacatgtattgaccaactaaatcttcaattagcctctaactctgggagaagtaggtagggaaagttagaatatctgtttgtatgcatatttataacagcataattcacaattgcaaaaatatggaaacaacctaaaatgcccatcaatcaacaaatggaggccgggcccagtggctcatgcctgtaatcccagcactttgggaggccgaggcgggcagatcacaaggtcaggagttcgagagcagcctgaccaacatggtgaaaccccatctctactaaaaatacaaaaaaattagccaggtgtggtggcaggcccttgcaatcccatctaattgggtggctgaggcaggagaatctcctgagcccaggacgtggaggttgcagtgagccgagatcacgccattgcacttcagcctgggcaatagagtgagactccatctcaaaaaaaaaaaaaaaagtggatacagaaaatgtggtatatgtacaccgtggaacactactcagccataaaacagaacgaaataatgacttttgcagcaaattggatggagtcagaggccattattttaagtgaagtaactcaagaatggaaaaccaaatattgtatgttctcacttataagtaagggctaagttatgagcacacaaaagcataagaataatacagtggactttggggacatgggaggaggtgggattgaaggataaaagacagcattttgggtacagtgtatactgctcaggtataatgggtataccaaaatctcagaaatcacaactaaagaacatattaatgtaataaaatgtaataaccacctgcttcccaaaaactattaaaatcttttttaaaaaaatcagtgtgtatttgttacagttggctgctgttggtatgttattgccataaaaatagataaacgaaaaataaagatgttcttaggaaagaattggctacttctctagctgagttagaagtgattggagatcaagccccttgtagggttagaaaatccagactgtttatatatatcaaatagcaaatagtatcttggagtaaaaagatatttcagttgaaagaaatgattcagccctgcaacaaagactcatttaaaaacgttaccttcccactcaagcttgtactttcacaaggccacaacatatccataattatgttgagaaagaagcactgggcaaaagaagcaatgaaagcagatttgacaagtatagttaatagaaagtttgggtataattgctgacatagggagctgactgaaagaacaaacatcagaaattcctaagttcttgagacaattatgctgtcagaaaatccctgagcctggattttgccaaagcagttgacttcttgaactctaagacaacacttaggtctgccaatttgtaccagcctgagaagtgggcaatgaacgtagggtagccagcctgatccactcatgcctgtgatcctagcactttgggaagccaaggtgggaggactgcttaagaccagcctgggcaatacagcgagaacctgtttctacaaaaataaaaaattagtagggcatgcatttgtagtcctagctacccagaaggctgaggcaggagaatcacttgagctcaggagtttaagggtgcagtgagctgtgatcgcaccattgcacttcagcctgggagacagagcaagatcctgttgaaaagaaatagaaagaaaaaaaagaaaaggaaaagaaaaaagaatgaaagtcaggcagctcgtcaaggagagaatgtaccacaatgcccacttccgatgttgtgaccacagagaaggacagacaaaagaatacatctgtgtgtgaagatctaatcaacagatttcccccatttctgaagttgacacattcaggacacctgcccagcaagaatctgtagttgcattggtccagggaatgctgtctgcctcccattcttcacttttcctaattggaatttattagtgtgcttaacctttctctactgtgggatcaaacactgggcatgaggtgtgggttgtgaggagagggtaactaactggtccttctgttcatagataaaccacaaggcgccatatctcgttctgacagatggctgcacatcactggaaggatcttattcgttgaatcagacacagaagcagaatgggatttggggttgtctttggcacatgggtggtttataggtgtgttctatgtgtgagaagaaaaatgaaacagatatatggaaaccagaaggtagatttagaagagattggtcagttgatcactgaactcatttcttttttttttttcccccttggcatgcagcaagacagaatttctcatgctccttcacagttagttgtgatgtacaaccgagtttcaacacttggaagtaagtgaaatgaaatgggctgctttctaggcctggataggaaaatcccctgcccacgattctccatgctctttccccatttagcttgatgcaaacaagccagagaccttgaaggctagctggtgacgatggcagagccataacatggaaggatgtttgatctatgaatcgccacttggagaaccgacttgctgttcaggaacacccgctttggaaattacatgttcaataaataaacctgtgttaagacactaagattcagggactttgctgttagagttgatgggattaccttaaccacacacccacaactggtttaatagaagattgaatgtaaaatgatttcaagtgcccaacggctgaatttcttaatatgctatcctaagtctcatcatgatgatacactaggaatgacagaaatcagtcatatggactctttaagacagtttttccctgcaggaaaactgtgaagagtatcacctgaggtggccacatctcctttagacccctctcagcctttcagcgttttctgtaaataaagtccattcttcagaaaactttcaactaaactttgatgagatagagccaccagaaaagaaaaatcatgtatgctgtaaccactagaccaaggttcttttccaaagaggtttgtcgattttgataaatgtacttctaaatatatttgacatacataggcatcgggtgtttaatgaacagctttttctgctaaacgtcattttttccaaggttctcttacaaggagcttgacatgtgtagatgattatgagaatatatgtagactcactttttacttttctttttatttatttatttatttacttatttatttatttatttaagactgagtttcgctcttgttgcccaggctggagtgcagtggcgcgatctcggctcactgcaacctctgcctcccaggttcaagtgattctcctgcctcagcctcccaagtagctgggattacaccatacccggctaattttgtatttttagtagagacagggttttaccatcttggccgtgctggtcttgaactcccaacctcaggtgatccgcccacctcggcctcccaaggtgctgggattacaggcgggagccactgcacccaggcttctttacttaaaaacaaacaaacaaacaaacgaaaagctttctattctcagaagtgttcttgccctggctattataaattttccctgttctatctaaccaacagaatgtattactcttccctgggaacatgcacgtgcaactccctctcatgtaaaaattgccatattatccaagaagagtgtgtacgggtgcataattcaattaaatatgtagttcagaagcaaaagtaaatataagattgtgctaaggttcatgaattcaaagtttaaatactgagactctcagaaaatgtaaaatgcttttaaatgtatatatttattctgattattaccttttgaaaatgaactgaaaaaagacctacttaggaaacagaaatacttctgagatattgataagcggcttattatttttattgcttcaatttttagttttatgaattactctccaccacaacatattactggaaagttaagttttactgcggtgatctttcactaaagtctaattcattctaatcatttcaaaattcagagtttggtgttccatatttttgtcttccttgtcagttcattttgtatattatttacttgataagctgaggcttgaaaaaaatactcgcaaaagcttgtctgtacttatggccctgggcaggagtacaggcactttctctcatgagtattttacataggaatgatccagagaagagatgtggccctgtctctaccttgacagtaagctccaaatgctgacatttgctgaagtaaaaattctccctgtctagtggcaaaggtgcccccattcctttgaccccaaaactcccacttcccccaatcttcccatgcagatgttgtctgcagaaatgaagccatcaggcatcagaccccaaagcagacttaggtcgcatttacacattttctatcacaagcaggataaagacagactcaagttacccattacatttaggacttggggctcttagcacccaggctcagggttttaactcaggacacttacaatgaactaactcagtactacctttggtagtactacctttgagaactaggttccctgctagactttgaatttcttgaggattgggggcacatcttatttgttgttgtgtccctggaacctaccaagtactagagcatcgtgggctggctgtaaatgtctgtgggatgacttagtaaatgaggaaggcgagacatccttgaccaaccatagtgactaagatactgcagtggaacacctgctgttcctagttaactaagtaaatatggatctcccatagtatatagagaaagaataactctaaggaagaaggggataatggctgcgattccttccaaaagaacgctgtcacatgtgtgggggcgctgtacatatgtatcatctcttaactacaatctatgcatgtagtttgtttacagagatatttcatgcatgctgtagaaaattcaggtcatataaaaagggattataataaagctaaaatcccctaaaagttcaccactcagaagaactctcccatcaacatttgtatggggatcacccaaggtcaatctttctgggtatgtctgtgtttatgcttcctataatttattttgatttatgtttttgctgtatcacttctgcttctcaccctttatgacatgatggagatatgtctcttttttattttactagtagtcacttttataactttaaatagcatattttaacaaagttcttaatatattaagtacagacataaaataatacatacagaaaaaaaggcacataaaagaccaggaatagcttactttctctcatcttcattttattggagcatgcttcaagattatgtcccttggccgggccgggcttggccgggcgtagtggctcacacctgtaatcccagcactttgggaggccagggcaggcagatcacctgtggtcaggagtttgagtctagcttggccaagatggtgaaaccgtgtctctactaaaaatacaaaaattagccgggcatggtagcacatgcctgtaatcccagctacttgggaggctgaggcaggagaatcttttgaacctgggaggcggaggttgcagtgagccgagatcacagtgagccgagattgcaccattgcactccagcctgggtgacaaagcgatactccgtctcaaaaaaaaaaaaaaaaggattatgtccctttatcctagtgtaattattattactttatattgtatggtatacttgctttcttttgtacagccaatatttccaatagatattgtgaataattgtttgctcaaatgactttaatctcattactagtccactcattctacacgagtttttgaaattattatcactttccagttcagtagggtatatctgatctatttcctgagtctttaaaatgttctgaatctttgaatatttattcatatatttctattttctttttatatgagctataacttaactggttatataatacttttgttacactattttgtctcaaattgtgtagctgttgcttcattgtctttgggacacaatgctgctaaggaaaaagtctggatccaggctaatttttttctctatgatattgttgaccctatattgttactttgtatttttgttatttgcatttttcgttgttgtgttcttattttttccccaatattttcaatctatggttggttgaaacccgctaatatggagggtcaactatgatatgatattaatacatatatagatatatcatatataatattatatagttatattttatatattatattagttatattttatatattataatattatatagttatattttatataatacatattataatacatagttatatttatataatattatgttatatctatatatagatatgagaaaaagcaaaaaacaagaacaattaaaaaatataaatacaaaaacccagtagagtataacaactatttatgtagtatttacattgtgttaggcattataagtaatctagagatgttttaatgtataagggaggatgtgtgtaggttatccacatatattatgccattttataaaaaggacttgagcatccacggatattggtatcgaccagggtcctagaaccaatcctgtgcagatactgagggatgatgtatattcttttgcatgtatgcttgtagaaatatttctaaatccttgcatttcaacaacctactacaatctttgtgctacttgctttgtgatacacatgcttagaacatcttgcctcatcttgatctgcagatttgggtttgaattaatttctttctttttgttttttttgttttttttttttttggtttgagatggagtcttactctgttgcccagggtggagtgcagtggcatgatctgggctcactgcaaccccgcctcctgggttcaagcgattcttgtgcctcagcctcccaaatagctgggattacaagtgcacacaaccacgcccgcctaatttttgtatttttagaaacggggtttcaccaaattggccaggctggtctcaaactcccgacctcaagtgatctgcccgccttggcctctcaaagtgttgggaatacaggcatgagctaccgtgccctgccctgaattcattcgtttgtttgtttggtttttaagacaaagtctcattttgtttccctggctggagtgcagtggcacaatcatagctcactgtaacctcaaattcctaggctcaggcaatcctcccatctcatccttttgagtaagtgagactacaggttatgccaccatgctcagctaattttaaaatttatttattttttttgtagagatagagtctcgctatattgctaaggttgatcttgaactactggcctcaagcagtcttcccacctcagccacccaaggttctgggagtacaggtggtaagccaccacacctgacttgtttctgttgttgttttgatattatcttcaggtataacaatgatccataagcttgatatttatttcgtgcctccatatctataatcttctcccttattaaataagttaacacaagaatttagagcaatgctttacacagaatatatgttcaaaatataaattattataactgattaattgttttaactcttttttccctaaactctggctgattttctcagtcttctccttcctatcactgactcagctctgtagtgctgattctgtacttcgagtttctaaagagcttttaatttccatgatggcaattactttctcttcagtttctttccttaatatggctagctgcccttaaagtgaattcacttaaattatcgtctcatctttgatctcttcattcagaacagtagatgatataccttaaattttattaaattcctccatgttggaaaacacttgtctaaaattttcttctaattccttgagtgtgctttcctccaaaatgtgttcctgaattaatcttctgcatgctagactttttttcttttaccctttggctaccttctcttttgcataaatttaacataggcaagatattttatgtctaggtgtctttgtatttacttacttatttatttatttatttttgagacagagtctcactgtgtcgcccaggctggagtgcagtggtgcgatcttggctcactgcaacctccgcctcccagattcaagagattctcctgcctcagcctctcaagtagctgggattacaggtgcccacaaccatgccaggctaatttttgtatttttagtggagacagggttttactatgttggccaggctggtcttgaattcctgatctcatgtgatcctcctgtctcagcctcccaaactgctgggattacaggcatgagccaccgcgcctggcctgtctaggtatcactgaacagtgaacgctattctacgcaggcttgccttttgcccaaacataaaatgggtggattctcattgcaactcctccttgttttcctgtaccttgcttgaaaaatctcatttgaaaaggaccaggaagtctccctgtggtttctattctctttaaagtatttcaagagagaggttttcagggaaggcaaaggggccctggagttctattcaggggattcctctcttctctcccctccatcagttggtctgaatccccagtaatatgggccagcttcacacaattgaaggtgtgccctggtctatggaaagtacctttggcatttagactttttttctctttggagtagggctgttatgcttcctgtgagatccttgtggtttatgagtttagggtttttttgtttgtttgttttgtttttcatatttcctaccaagcattttgttttctgctgagatttggggtagatccatttttcaaaaaatttcaactttatttcaggttcagtagtacatgtgcaggtttgttacgtgggtatattgcataacactgaggtttggggtacaaatgatcccatcaaccagggagtaaacacaatacctaatgggtagtttttcagccctgacccccccccccttttctagtcatccccaatgtctgttgttcccatctttatgtccatgtgtacttaatgtatagctcccacttccagaaaaccaaatactacatgttctcacttataactgagtagagccattgatcctcaaagatttgtctgtttccttagttagccaaaggggaaaagtggccaaacttttgatatcattcaagtgaaggccttgaaaaaccatttgtcttcagtggggaaaaagaactgcaagtgggttattctacatcttttcttcaacggccgacacctccattcttggtcttaacaaattttgaggataccagtcagcgatgatgagtatctgaatatatgtgactctctcatgggcaggaaaacaccctactaatctttgtacacttggtgcccaggtgctatgcatacagataaattctcccttaaagggtaatttgaatgccatatatatcatctgtagacagatgatttttctgcttgtccttagccacttaggttttgtctcttcttcttcaatctggcaatttcctatatatgaaatgtacaccagccagtagtgcaatttcaattcataaatgttacgttctactgcccatagatccccaaatgagctcatgaggaacttagagtgaagcgaaatgccagtggacctcctccaaaggcttgttcctccaacagcagcaaattttgtgagcagtccatgaaccccaagtctgagagatcagtctcagatctatctaattgcagggggctgtagagacttaaagcctgtatttattatcttaattaccttttggccagggcaaaaggagatgttatatagacaaccagttgctttgaggtttgcactgaatccacgtatctccgtagttgctcccaaccaatgatgaagcacagcccagtgactaaaatgggctatttctgggaaacataggatgctcccatggtgattttagcttcatagtttccccacagccttgctgaagttttcctggagctgtgcacaaatctaaaatacttgatccaactccctttcttttcctctttctttgtctttcccggcttcctggtatctttctttccctcccacctttcttctctctctcacttggggttagaactgaaggattacctgttaaacacgtttaaacatgcttttatgataatacagttcaaatgcttcccatatctacattataacctttattatactctctaatgtacttcagcattatgaaatacaacataacatacttcaacagggaacttgactttcaaatgtcactattagtacttactaaattgaaaggaaatgttctcctatcagcaagtaaacacgatacacttgaatattcatgccattgcaaccatgcactattcaaatcttctctgtcaaataattgtttacaatccttttttttttttttttttttttttgagatggactcttgctctgttgcccaggctggagtgcagtggcgtgatctcagctcactgcaacctccgcctcccaggttcaagcaattctcctgtctcagcccccctagtagctgggattacaagcgtgcaccaccacgcctggctaatttttgtatttttagtagagatggggtttcaccatgttagtcaggctgatcttgaactcctgacctcaggcaacccacctgccccagcctcccaaagtgctgggattataggagtgagccactgcacctggcctgtttacaattcttaattgcctgtcagtggtgtagatgtgtatgtatgtatggcggggtcacgggcattattaccaagtttaaaaggaaagagtctaaaaatagttcccatgactcaggaggaaagtgtccctgtgttgtcaccttatttccactttagatccgtctatgttcgtaaccctgggacaggatcaatgatctgtaaaccaggctcagcctccccctggtgagcctaatgaggcacagaaataaaatataaaagtaagttcaataccaaatcttataccctcctaagaaatagtaagagttggaaaaaataaatactcttttataaagagtgaaatgaatctgttttcttcatatctcccccacccctaacctttagtagaagccagcataaatctggggagagaagccctccatgagtgctgggccttccagcctctcacccacaggccatggtgtcactgtgactatagttttactaataatactatatggcggctcatttttctattcaaactctctggaagatattaaataagtctgttttatttaatagataaatcagggctgcgatgttctcaccaaccaattaagaagcccagggaaaatactgacactctccttctgaggttcctctgtgcctcctgaggatggcatatgtaaagttttctgtttccctggtcttttcatcccattcttatgcatcatatgagctttctagggttgtcatgacaatgtgccaccaactgggtggcttaaaacaacagacatttattgtctcatggttctggaagctacaggtctgagactgatgtgttaacgggaccacactgcctctgaaatctgcaagggcgatctccctgcctcttcctagattcattgggtttgctgacaattgttgacactcctcggcttgcagctgcggcacttcagtgtctcccttcattgtcacacagtgttctcccctcttctgtctgtgtcttcatctcctgtttgaataaggacacctagcttattgtattatgatccaccccggtgatctcatcttaacttcgttacatcttcaaagaccctatttccaagcaaggccacactcacaagtactagggggtagatctttaacatatcttttttggggaccagttcaacccataacactaagattgaaaacctggcaacatcgacttaaatatatttgagtgtgttagtgcaaacctggttttggtgccttttacattcaactggacattactggtgttatctcatacccctctttacagagttctgagttgtcttcgtgaattcttatttacaacatagatgcattagacacacacacaaaaactttattttgtttgaaaatccttgacctttggaatacatttaaagatgaaaagaactatgtagtcaactcaaatctctagagaccctgtagtcctcatccttttgttaaactttcctcatgactttgctacagtgggtagtcaggagaaagggctttcccctacctttaatcacaattgtctgtggacaacttttgtaatatatcccaatgttgtaggagtctcagcttgaccataaagaagatgctaatgggtatgttggacgaactgttggtgcagacccaccaggaactaagggatcttcctgtaagaagttcttgcaaggaaagatggaatttggcataatggacttctacagatatcaggctttggtcatgtaaaagctgaggagctgctgaacatctcaataagtttaatgtatctggtttgtctccaggcccttgggacagacgcatgaaatctgtggtagtcaggatgggtcacactgtactaacccaaaaaggttacagctattttataaacaccaagagatgcttgacaagacaataaaacatagaaagtactattatttgagtgccctcggtacttttctcacacctggccaagacctacactttgtagggccttttctagcttcctctagttatagccttctccagaggttaaaagttctacatagctaaggggctgtgtccaccaagcatctttgcccccaattctcgcacacactgttagaatccagaaatttccttccctaaagaacgtgatcccattatcaagaatctccaggtcccttccccaggttttttatcctgaagatagatggcacagccagtatgtgtagatcaggctcaaggggtgcctgaggggtggctattagtggggatggtgtgaatagagcttgggcatgcagactggagcatccatacacttatccaagaggctgctgggcacacaaggaaaatcctcaggtggaaagggaaacaggagtaggctagaggctggggttaggtactggaggctggctctcccaggtcactatgttccatcatgggacactgaggagtccaagaattccaaatatgaatgtggtctttcttgtaattatgaaggtaggcttgtcaaagagggaagatagtacatatattattgaacattttcttagcttgattcataactttgaagtacaagtgacccttgaaccacatgggtttgaactgcacaggtctgcttatccctggattttctcccacctctgccactcctgagacagcaacaccaacgcctcctcctcctctttctcttcctcctcctccacagcctactcaacatgaaaatgaaaaggattaaaactgttatgatgatccacttctacttaatggatagtaagtatatcttctcttccttatgactttcttaattttattttttctagtttactttattgggagaatatagtatatgatacatataacatataaaatacgtgtcaatcaaatgtttatatgattggtaaggcttctggtcaacagtaagttattagcagccaagcttttggggagtcaaaatttatttgcagatttttgatggtgagggagattggcacttctaacccccacattgttcaaaggtcaactgtaaaatcctaggttatgagggtctctacttgtactcttgccctacaaatgttaggggtgggtctgggtgcctgtccatcaaagtatatttccagaggccaggtgggagggaggcagtagctgcagatccaaggaagcacagagaaaaatagtagataagcagccaagatgagacagtggaagctcaatgaagttatgtcacttatctgtctgaaaccttaattctgccttgtcatggaaactggcatattcacaggttctggagataaggaaacagacattttggagggctgttattctctctgctacaggctttaatcacctgcaacttggttataaaaactcgtttagatgctttatcaggtagcagtgattcaaatgaattacactctgtagttaccttgaaaggaacccctgaaaaagggattgcagaagccaaccaatatagcaaagcacagacttcacgtcctagctttttgccttgacttctttatttggtcaaagaatctctctctctttctctctctccccgcaccccccaacccaccccatcactcctcttctcctctgcctttcctctccttctcttgcttaacaactgattcacactgtttaaataacttccgtgggtagagagaacttgaagtacaaaaactaaatagattttctaagtcacacaaaaaatctgagaaccaagatgcatgcatttgcttgcatcaacagataacggctaacttgcattgagtgtttctctgtctgagatactatactaagcacttgacatgtgttatcttattcactccttctaactgccttattcagtaggtgctataattattactatctcatttcacagatgaaaacactgaagcttgaagaggttaaagaacttgtccacaaccgtacacgtatcatgtggcgcagtcagtcctcaaacccagcctctatagttttgcactgagccccttcaccaccatgactgtatctaggaatccttgctaagcttccccagagatgtgaacaccttccataaacatgttatatacagcagacatgaccacagcttgttcaaatcagtagaacattttccaagagcctaacatgtattgggtcccgtgttcaatgctagggatacaaatataagtaacaaaatgcccatgcccttcagaacctcagcttcctggggaaaatggaaataggaaatgtcaacgcagcaagtgaagtgctatggtagaaggcattacagaagcccagcagaaggctgcaagcgatcaaggttgttaaggagaaaagaaacaggctaggaggggaggattaaaacatttgaggtggacgttaacagatgaatacaaataagccagatgaagagggtagggaaggtatttccagtcagggataagagcaacgtgaaggccgagcagtatgggaaggcacggcccatgcacagtgtcatgtacctatttacaccacacactactactctgaactctttgccataatacactctggaatgctgtatgccttagcttgaccttctctatttctataaaaagcgaaatcactcctccctctgatgacccatgtcaaggttgaaaaaccatctactgtatttcaaaattttctgagttgatttggccttaaggattctctaataagcctgatataattcttaacaattcccccccaaagtattgaactaatagctattccctgacgcaaagcaattttctcggaggaaatgatcttagaatttttctgcatagcgtggatgctttttttttttgacagaacactgatttctgaaaatgaatagaaagcagctgtatagctgagcttaaatgtagcccaatcatgtcatccgtgtgccagaacaagataatttttccaccctaattcccatcatcctctgcttgatttgaaagacacctacatatacttgactaagttctgggtgcttcaaaaatgtatactgtttcttcctaaaggaatatgaatttggaaggggaatcccttatcctaaagcaatcacactgaaaatatctcttgacatacatttagactttcaggaataaaatgaagattgatgtcacagtgaagtggttcaccagaatccagtaaaacttggggctaaggaaactttgcaatcaaaaaagcctatccagctcttcttgttcttagatgtccctcctcatttcttggccatgctaaacaaaatctcaactgttatctcaaatatctgaacagaggttattctgaacagacacccatgctgtagggcaagcaggcccttacaggccttgcactctttatcgtggccttgtagatctttgcttaatttgctttagtaaatattctaaatactgaccctcaaagtaggagacttttcctagagtttctcctgtggagggggaaagtcataaagctaattttggcaatttgaaaacaaaattttcatcactatcaacgaagaatatagcaaattttaataatatgacactgtgtcatttgaccacctgttaactctagatggcaaatatatttaaatgattctactttcatagatcttacttagcaataaggtgctcactattatcatcgtaagatttttggtgcaaaaagtatatactagacatctgatatggtttggctgtgtccccacccaaatctcatcttgaattgtagctcccgtaattcccacatgttgtgggagaagcccggtgggagataactgaatcaaggggggcagtttctcccaaactgttctcatggtagtgaataagtctcacaagatctgatgattttaaaaggggttttctttttgcttcgttctcattctttcttgtccgctaccatgtaagacatgtctttcaccttctgccgtgattgtgaggcctcctcagccatgtggaactagagtcccttaaacctctttttctttataaattatccagtctcgggtacgtctttatcagcagtgtaagaatgcactaatataacatctattcttctgtggtcagaagcgctctatgacctatgggtgtcacacccaataaatatgcatgaattaatggcctgacagtaataaaataagtagaatagagtccttgatctcactagatttatgatgaagttaaggaaagaacatataacactgagaattcataaacaaccccagaacagtattaaagacaactacgtgttaaactatgatagttcagcagaggagaagaccagtgtgcaacagaagagtcagagggagctacactgagagatggctttgtccaaaatgcaaatctcataacacagaaggcagccaaactcctgcgtacctccttcctcctcagacagactttaaatactttaaaggctggagtttcccagggtttgattctcatttctcttttcatctccatctccactgtctcctcaggtgatgttatccagctccatggagctcatagaatgaatgattctcagttaatgtcatggatactaatctcccatttgagcacctgatataaagatccaaccacttacttgacaactcaacttccatatgtaataggtaattcaaacgtataacatgtccaaaatagaacttttataccctacttcctgacctgctacttcctcaatcaaccacacatctattaagagtgccaatattcactcaggtgcttggaccaaatcccaagaatcaaccttgactcttctattttctttcttgcccatatctgatttgtcagcaaatccaatcatgtcttatcctttccactgtttccacctttgtataagccaacatcctctttctcctgaccaacaagtagagttatcttcctaaaacttatatcactactctacttaaaacactccagtggtcttccagtggtttttcaatgctaatggaataaaatccaaactttctaactatggtctgaaagaccccagtctagtaaatcaagaactattaatcatgcagtttggtaaatcatgacaacattaaaaaaatagagtggaataaaaatgccacagtgcaccatatgtagtaagggaaagtattttgtgatgctttttaattttaaatattaaggtataaaagataggaaaaaccaacaccactcaacacaggactactgacaccagattctccagcagacatcagttggatgtcctttcaattcggacactatctacccggtggtagcctcagatcccacaggttaacggctcagcccacaagactgcctcccaattctgatggtaatcacaagcatcaggttgtgacttgggcttctgactaatgggctataaattggagttcctacaacattcttcttaggtttgattaacttgctagcacagctcacagaattcagggaaacactttcacttatggtcattcattattataaaggatattacaaaggatacagatgaacagcctgaggtaagagatgcatagggtgacacagaattcagggaaacactttcacttatggtcatttattataaaggatattacaaaggatacagatgaacagcctgaggtaagagatgcatagggtgagacaggcaggaaggggcatggagcttccgtggcctccccaagcatgccaccatccagaaacctctgcatattcagctatccaggagctacccaatcattttggatttttatggaggcatcattacatgggcttgattgattacatcccccataagtggggagtggagatgaaagttctaactctttaattacttcttcagtttccctggaaaccagcccccatcctgaggctacccaggagcccccagccaccagtcatttcctttgcatacaaaaagacacttgtcactttggagattccaagagttttaggagctatgtgctagaaaacaagaggaatgccaaatgtatttatcttattataaatcaccatattaagttaggctatgtgtgtatttgtttgcaacacaaaacatttttcttaatatgagttacattcaaaaaatgtttgcaagcccctgacctgtatgatctggcccatgactacctctctgatcttttctaaaaccacactataccttgttcactgtgctacaacctcactaacattcactctagccctcaggcaggcaagctcacccctgcctcaggacctttgcatacattattctctctacttggaataatttatccttagacattttgtatgtatgcttctttcttaccattcatatctcaattcaagtattacctcctgctaggcatcttatctctaaagtaacaccttccgtactgttcatctcaccacagctatcttatcaccctgtttcagcttcttcttagcactgtacccatctcatctcattcatttacgtttttgtgtgtgcctttattttctacgtatttctcttagaatgtaaacctccacgagttcagggaccacatttctctggtttactactctatctttagtgcaaagaataatgtttatcacacaacaggtgctcagtaagtatttgttgaatgaataaagaaaactgaagacataattcccctctgttaaggtataatgggaaacctttggtctctcctgggcttctcagggccccgtgtagaaaagtcaaggctgtagaattagtattcaaaactcctccctttggctttgtgttcagtccaagagaccattcatttcagcacattaaactgttaattatggagtctggcttctcctttctttatgtggaaagaataaatagttattactaaatagtcatttaataggcagtggtttctttcagggcaaccattattaaaattgcacaaacatgtacataaataaagccatttacttaaaattaggacagactgacttaatggattccacttttcttactgtcctgggtactacctgcttggaatacacagtccttttttgtccttcctctcactttatttcctagctcttgccaatatgtacaccgttgatatatgactatttattcatggtaatttatttccaagactttttttttttctggggttactgatttagttaatagtatttaaaacacaaagtaattttttttggctggggagagatagccaaattgataattttatattatgtatgtcgtatgagtatggctttccctgaattttcactgcagatagacagacagaacattggtaagaaataggaacaccagactagaagtcagttatttaacgttccagtcccacctctcaccttaaccagctgaaatatttggataagtcatttaaattccctgagccttgggtttctcatttgtacaataagagggccagtttaggctttaaaaattcctgttatgtattcagacttattacattcaaagaactattataaattatcagttaatctttgcaaaaaacttacaaagtcggtactattatttctcctattttacatatgaggagaatgaggcagagagaataaataatacacattttaagtggtggagatggtttgaatctaggtagtctaaagccagaattcaaactcttattcttcttactgtaggatctctgttcctatttatctctgagagttaaatttatagctgggcatggtggctcatgtctgtaatcccagcactttgggaggccgaggtgggtggatcccttgaggtcaggagttcgagaccagcctaatatggtgaaaccccgtctctactaaaaatacaaagaaattagctaggcacagtggcatgcgcctgtagtcccagctacagtgagccgggatcacaccgctgcactccagcctgggcgacaaagcgagactctatctcaaaaatagtaataataatttaaaaaagagttaaatttataggttgtgaatccttggatctcatgttgttatagtaggtagatagtcaggcatgagtaggggaggtgaggcttcccctcatcccactaggaatgtcaggcaaccatcaggtgatggtcatgcagttgtcacgctgcctctctaaaataataattggtcgcagccagcaccaggaaaggcaggttccatatagatagaaaaagcacctgaaactggttatcatcagtctcctgatgagatctcaggatttgggcaaatgggctcaaacatgtgcattaagaggcaaaatggcagagtttcactggtatgtccatctgggggcgttccaccagtaaagggaagaatgagtcaggtgagcataagtacaactctagtaaacacactgcccatgctcacctcccaagtgctagcaggccattgtgtatgtgcgcagctcaccccaagggaagaagcaagggaaaagggatgtaagacaccagaaacatgccagcatagaaaaccctaagtccaaggtcaaatagggcacttgtcctctgagatgccctcttggccctcttccaagggtactttgctttctttgaattcatttgctttatttgaattctttcttctgaagagggaagaatcgaggttgctgaaaacccgtaaggattcacagccggtaacttgggtacccgccacagctaacatattttgttgccatgtgactccaataacttcaacctatagcaatgttagcttgtctgtatcttatttcaccagcaggctggaaactacttaagtgtaaagacgatgttcatctttgaataacctgagacaattagctccaggccttgcatgcagtaggcattcaatatttacttttaaaatgatgaggagttgggatggattcatgcaacaattttgacattaaccaggtgaaatctaaggtcctttctgagagtgtgtgattcaggcattgactgaatactcttcttgaaggagttggctgtgtctgcacagattcacctctgatttgctcctcaacttaatgcaatctggttttcagccccactgatgccactgaatctctgcttgccaaagtcaacaacacacttcgaaaggcatttcttgtcctaacctattgcatctcctgagaacatctaatattgttaactatcccctcttccttaaagcgctcatttcccttgaactggataacacagtgctgctgacttctctccatccacctctcagggtgctatgctttgtcttcattttaggatctgctttccttacctagatctacaatgttgggatctcccaagggtctgtcactggtccttctcttctcgctttccacactatactccttgggctttcccacacatatgctaaggatttttgaatctatagctccagcccagatctttctgttgagcttcagacttggtatagtggtaaaaagtgataacttactttaaaatacttccatatgaacagtatatatatgtagagtatattagtcagcatttgaaatatctaaatctggaatccacactctaggaatggataggaatttgcagtacctaatcagggatccatattcagagatggcttcaaaactgcttcatactgtgttaatagtctctcccagaaggccaaattagacagcaattttagacataatttttcgtttgtggatgagtgatacatgaactatatgtttggctataggaagggggtgtaaagacccaggaagcccagcagcctatgcctttgaagcaccactcagcgcctggcttcctgattctgtgtctctctcttcacaaagaactctgctacctgtggttgattggtcccaccacacgcaaagctcaaggctcactgtatcttgaacatctattggatagcaccttacacatcaagttcaacaggtccaaaatggaactgatcctctttgcacaaaattgatcctccttctatgttcttttatacagtaaatggatctacactcactcaatgggccaagccagaaatctggacattagtcttaacttctcccattctcatcatatccacagtcagtcaattaccaaattccatcaacatcatcacctaagtcattctcaaattcacccatttctctcccactccacaggcacctcccaaacctagggcaccagttcctctctcctgtccccagctggaccccttctactctattctttatacatcagccagagtgactcaggaaatggaaatctgtagtttaattaatatattgtagttacttataggaaaaaaaaggctgatagagaaaatatctaacaactattaaatagtataggtagcaacaagtcaaaagaaatgccaaaccacttacagtgaaaaatagttagaaaacaacacgttaaacaagccaggttattgctgcaattatcctaactttgttatgttgtagattgggcatatcactgttaacctttgtttcctctatgccaagtaatgcttgacagacagcaggctcttactgaaaaaaatgaaagaacatgaatgggaaaacattcaatcaatcaaccttttttttctccccccaacttccactcccagttttcctcttaaggaaggagtatgcctcaaaccaagaaactgagaagtttccctaaatcctattgattggtaccctggacttggaagcaactgacttcttgattttctaccagggtttagttaactccacatagtatactctatgagacgtatcattgctataaggttaatgatagttatagggcccagtcaaacatctcacagggcctatattctgtgtcacttagcagtatgatgcatcttggcccagggatttgcaaccttggcctgggaatttccaggagacaagactacctcagcacagatgcagttctcataaaccttaaaacaaagcttagcgttacaagaatagcttaaactccctttgtgaaagaaacaccttgtaactgacccagaaggaatacaggtataaggaaaggggaagaatccccaaaactctaagaatggtctctggatggaaactctcctggtcaatgggtcacctgcccctcaggctgtgccaggcccatgccaccacctgctcccgctacctgtcttttaagggttctgccagaataaactgcgtgagcatcagatgctgcctaagactcagctttgatgggaatcaaaccaatggaaagaagtttcccctagaaaagctggttacctagagtcacccaagacccccaagactgacagtccagctcaacaaatgttcattgacaatctttagcaattataatgatgaatgagtcataccctctttctcttgtaaaggtcactgtattttggtggaaataaacatgcgtttgagtcatttaagtaaataaatgttgaagctgtgttatccaacaggcagagtaaactcatatttaggatatcagcatagcaggacactgaggacatcaagaaaaatttagaagagttcgacagaattgatataaaaaaccaaagcaatcaccaatggacaagttcagagctttacgatctccttacccttatgttataatttaatatgatttttattatgtggggttacacaatagtttggtctccccaataaaagggacctcttaaatcttaatctattcctaataagtgctaaaatagatacataaatagggtgcttgggagcacgcaggaggacaattaaataggctaaggcaggggagagtagggaacaggcgaggagaaggcagcgtcaaaaggagggatgcctgagctaagtctaaaggggcaaattaaccaggtgaaggtttgggaagctaggagaggtatactgttcctctggtgggacccactcacccctctgagctagacctcccaatacttcctgctagcctagaccatcatctgttagctccctattatctattacatctgccccattgaaccttgactctgtgaaattctgagtctgtacctcccaagaggtctacctagctgcaagctccatgcttggtcgtatctcaacactcaagaatcacaacatatttattccattccaataaggctaatttgctcatggtttctatttttgtttttccttcagtgatcacctacacttctgttagtcattaaacaaatggcagctggcatcatcgccaactttcaaaaccttattcaaaagtgatcttctataggaaatctttcgagtggttagatacccacatggaaagggcttccttctcatgaaaagcaaccaatgcactttgtttagcattgtgtattcataaatatttatccattaaaaacaggcatctgtatggcaagtcccacaaggatgatttaaccaagactgcaaactcctcagctgaccacatcccatctctctttgcttcacatcatcctgctagcccctcaaatgcttggccggccaacaaccatactgtacagtcaaaaagattcatcaagtcctcacttagtttttattcaaccttattccatcacaatttctcaccaacatcagattaccggtgaaaatttgatcagagagactgaggtaagagagactcaaattatttaaatctctcaatggaagttaatagttttgaagaattagagcatttcatatgggagcaatgtcaaaataggtgacctagaactgaagtagttttccccagactctgcagttactgaattgactccccaggctgctcatattttccggctatttctgaaaagaaaaatatacaaatgcaatacccctttttttccccaaaggtctttgcttccctataaatactaaagtgtgctccttaacccacttatcctgtgagatgcctaaaaatggcctcttggatgaaataacttcaggaaacaccgtagagtatagccctggtttgaaaattcactatgaacactaacgtgttaaagaccctattacttctgtaaatagcctagttttacttcgttaactcttcctttcacaagtgtatttgggcacagatcaagtttccccttcccgcaatattatcaacaccactccatacaaaggagagttggaaacagccatgttactcctccactgaattcacacacacacggatataagtcttgtgtagtctgaggtgttcatttcaaccctggatagtaattcaaagtagcaaacagctttttgatgtttgctttgtttggttgcagaaaataagctcagggtagacagttcttcaatgacagttctttacttgcataaagctagtatggattatcccaacttttataatgacagtagttaccactgggatgcaaaagaagcaaaaagaaaaataggagttctaaggggcaggagtattagcattgcactataatgctgcagtctaagcaggcattccattactgggtcgatggtgaatacgaagtggaggttcaatcactacacacacttactcaatagtctcctctaaaaaaggcagtaaatgtcttgtttttggctcagatgaaggcctatcaaccgtcagaagtgcaggcttccacacagagattcagagcagcactacagccgctcagcatgtgaatcccaagaggcaggtgatttagtcaataggccccagagcagctattttaaacacagggcctgttctctttaaaggtacaggatttatttatttgtgggccatttaaaatttcctgctttcaccggcttttgatctggactcaggtattatatcttgtcctattttccaacatgtaacaattccttacaattataatattcacccatccatccatttggctaacattattgacaacctattatgtaccaagcactgctctgttttttttttattgcatgtaaaaatgatggtgatattataatgaatgaaataagcatttgtttttgcaatccaagtaaaatttacctgtattgaagaatgtagaggatcttgtcaggaaactaacgacactgccacatgaaggaaatcaaataaagccgggcgcggtggctcacgcctgtaatcccagcactttgggaggccaaggtgggcggatcacctgaggctgggagttcgagaccagtctgaccaacatggagaaaccccctctctactaaaaatacaaaattagccgggcatggtggcacatgcctgtaatcccagctacgagggaggctgaggcaggagaatcgcttgaacctgggaggtggaggttgtggtgagccaagatcatgccattgcactccagcctgggcaacaagagtgaaactcagtttcaaaaaaaaaaaaaaaaaaaaaatcaaataagagaaaggtgctgtgctttttgtaggtcagtgtttttcacaagacaccgatattgaaatccctggaagtacctatttaaaatgcagattctgctgggtgtggcagctcccatcggtaatcccagcactttgggaggccgaggtgggaggattgcttgagcccaggaattggagaacagcctgggcaagatagagagacccagtctctaccaaaaaaaaaaaaaaaaaaatcagccaggcatgctcacacctgcagtcccagctacacaggaggttgaagtgggaggatctgcttgagccagggaggtcaaggctgtagtggttgcaccactgcattcatacctggcaacagagcaagaccctgactcaaaaacaacaacaacaaaaaataccaaacatttggccaggtgaggtggctcatgcctgtaatcccagcactttgggaggccaaggcagtaggatggcttgaacccagaagttccagaccagtcgggcaacataagacctcatttaaaaaaaaaagagacaaagaaagaaaaaaaagtcagaatccaggaatctggatttttagcagtactctggatgttctttgtgcatccgtagtgccatatccatccctgtcatgaaggaggagaaaagaggcacacattctctccaatagaaacacctccacattcatgtcttttatttattgggtttcctgtatgacgtcttcaaaaaaaaaggatgcaagaaaaatatcacttcttttaagtgtagcacattagaaagtcacacctatgagactctttagctgcctcatcattgtattttaaatgtggcctcacagagaaaccatggattttagaatcgggaagatacacctccaccacttattagttatgtaaatttaacaagctaatttgtctgtgtgagtcttgattttctcagctataaaatggggacaatagcaaaaaataatgataagataatcagattaaaagatatatcatagagatatatatatattatcttttaatatatattaaaagatatattaaaagatatatctgtaatagagatattacagatatattatagatatagatataatagatatatgacagatatattatagacaaacacctggcaaatgagtgggcttacactgggtactccccaaaatttacccccaccccttccaaattctgccaaattttatagagtagctatataaaaattatttttatgtgttttcttaaatgctcttcttaagacattggcccttatgttgtaggaaacacctcgatgccaggttgaagttcaatacttacgttaacacattatctttctattttatatcaatgggagttatttaaaccaccatatttcttttcagcttaaattatcagaaaatttagatgtgaaattaatgctcaaaataaaaaagtgtttctcctctctatattacttatggttattcttaaaaacaaatcacccatttacttattcaacaaatcattttggccatccaataaatttattgagagggtatatcctcaagaggaagagctaagtcttatgcctgcatgtaatacactttatttattaactgagtgatgatggacaagctatttcttagcctcaaactcctcaaatgttaaattaggctaataatagtatctcgcaagattgttgcggggattacataaatcatgtacttagaacaatacctggcatttggcatgcactatagcaatgttatttagtattatttaccaaagaatagttactgaagatacacagtaaaaaagcatcttaaaaaggtaaaaagagtatataaacttacctaagtggaagttaagtgtagcataaagtatatcttataaatgaataatggagtaaatgaaattcttattcatctcatctaatgcaagaaaactcaactaccaacattatggaattttgatttgatatcactcctaactctattttcactctccctgaaggtgttcctcattttccctccttgagtctgtctatatgcaagaatggatgagcaatcagaaatgtgtgctcactgatatgtggatatagacctctgaagcatctaccccattctaagatggtccctgctcaaagggatcatgctgaagaaaggtgacccttccagctcaggtttgctctgatctccgtagcataagcaacacaaataaagaaactatagtcataggactttcgttaaatgcttagttgaagatctcaatttctgtttgcttctccttagccatattccaagttcattaccattaaaaataaaacaacatgtaatcttaatatatacaattagcaacactgtgtgctcaacgtgtctttcttaagttcttgcagacttctttcttttctcctaagaaaccccatctctttagatgagcccaactattcacactctttcctctcgctcctcaaattataatcaccgtcacatcaaagacccactaaaaggcactcactgaagcttttaaattaaggtacttgaatgacttagaaataggaatcacaaaacaaatctatttacatgcatttgtgcagaacattcctaaatgttcaggtgacactgacctactaggccctttagctcgctatgtgaggaaataagatagaatcttcaaagaagtttggttgtcaagaagcctctgggaccagtgaaacaaataattaacttatagtggaaagagaggacaagaaatgtttccctctgggcctgaaatacagtgtgctctactttgcataagttaacatcgggaggtttgaattttccaaagggcttagtggctaattagctgtgtgaagttgcccatagtgtgtccttaagactaaacattcccatttctcataaaaagctgtaatagttacatgaagcaaaagaaattatctctactatgtgtttggggtttgtctttcttgtggcctcctttttacttctattacaacacttacgacacagtactatgaagatcaactctctcttccccactacaatggaagctttcgaagtataaggattgtgtctgacttaactctgtattccatgctcctagcttgacatttagtaggctctgtattccatgctcctagcctgacatttagtaggctctgtattccatgatcctagcttgacatgtagtaggcattcaatcaataatcagtgtttttcagataagtgggctagtatgaagaccaccgagagctatccttccagggctttaaacacctctatactcagctagtagaacattcaagtaaaatacagaaacctactgaataatgagatttttttttttttgagatggagtctcaatctgttgcccaggctggaatgcactggcacgatctcggctcactgcaacctctgcctcccgtgttccagtgattctcctgcctcagcctcctgactagctgggactacaggtgtgtgccaccccagctaattttttatttttaatagagatggggtttcaccatgttggccaggctggtctcgaactcctgacctcaggtgatccacctgcctcggcctcccaaagtgctgggattacaggcatgagccactgcacccggcctacaatgagatattttctaagaataatacctgcaagtagattaattattataggcataattttaatcagaacaataaaaatttatgttttctaactagtttcgggcctaatagtttagatgcataaggaattgctcccatctgaatgtagacagagagtatgtgatgggctgagtccaagaaaatgaaaccataaaaccaaagtcctacatttaaaattttaaaaagcagcaagacagaatggaagacagcgactgaaacacatgagttttcctgctgaccacaagcaccctagcagtcagaagtgggatgaaagctaataacacaatactcagctgcattaattcagtgggtcagtatttttatcagagagagtaaactttactttgcttttgggttctatccataaattgtgtgtgtgtgtgtatatatatatatatatataaaatattgtgtatatataatattacgtgtataatcatgttttaaagacctatatttagttgcactaaataatcaaagctaaggaaatctggatcttgtgaatttcctctagcttcttctccttattctgctctatgatagctcacaaccatagctaaaacatcctgagcatcttctatcagcagtcaggtactacagtaatacattacctatattcactcatttaagatttacaacaactattattactctctttactgcagatgaggaaacagaagcaccataaaactggggaaccagtccaaggtcaaaaagtttatgagtggaggagctgagcttgatcaagggagtgtggcatctgagtctgaatcctgatccctgtctcacatcatcttttctcgagacagacttggaaatggaagacagagggaagcagtgtagtttattttagtcttggtgagtgggagaaagatgtttaaaatatggatgcagcttagacgttgatatagtttggatgttgtccctgcccaaatctcatgatgaaatgtgctctccagtgttggaggcggggcctgttgggaggtgaccggatcatgagggtggatttctcgtgagtggcttagtatcatccccttggtactgttgttgcaataggaagggagttctcatgagatttggttgtttgtttaaaagtgtgtagcacctccccctcctcttgctcctgcttttcacctgtgtgtgtctgttccccttttgccttctgccatgactggaagctccctgaagactccccagaagcagatgcctccatgcttcctctacagcctgcagaaccgtgagccaattaaatctcttttctttacaaattactcagtctcaggtatttctttacagcaagaatgtcctatagagatgtggatacttttttcccccaatcttggccactatcatgtcctttaagttatcagagatatataggtgtgttttcaaaccagtagtgtatttttgtataaataagaaattagcaattgattctcacttattccatttctccagagatacaatgctgacacatcccgaatttaaaagcattttaccacctagtggtgggtaccttgagaaactgccagatactccaatagctcagagcaataaagaagaacgggggaaaatttgctaacataaattttaagtggaaccatttacatcttggtaaatcttccctatatgtcaataaaagaaaaataaaagcattatattaataataatcataatgagaagaaattatacagtgatatcaatttccttggggagggtggatagtagtataacacgcttctcatttatttaatttttcatatgtggctttttgtactactgaaatggtaaaccatccatgagggtgtggctgaaagggatgtttagtttatgtacaaaaatgcaggagaagcacacccctagtccttcactgacatatttccgaaacatcagaaaatattctaatcaaaaccgctgttgattggaacaggataatagaaaattcaattgaaacaaaagtaaatgaaagaagaaaaacaatcggagtctctattaaagaagaatttatatgtcatgaattccttctattttactgggtaccttatttgatcatttaatacttgcaacaatgttgtgagaaaggtattggtatcctcattttactgatgagaaaattgggtttcagatactgtaggtgctcaatgtcacacacaagttaggcaggtttcaaagaggttcagatgacaaagcctctgcctaggatgacacctcatctaagaaggacagcagtcacctgctcacagggaggtgatccacacttgtgctctgatgccaagtgtcaggtggacagaggtgaagagacataacatctggaaacatgagtagaagaaagctcaccaggagcagcagagctggttattttcgtgaaagataaattgatgggttgcttgctgatagcttgcagtgctattccagataggctggtaacccaaataacttgtggaattctccacagctgaggagaaatggaaaaaaaaaaaaaaaagcactagccaagaagtcattcgattatgctaaacaaaatcaattcatttatgacttttcactttcgtaaggtggggaatgagtggtttcttaacgttcatccagcaattgttttctagcctcattgcacgactgctttttaagttcaccttgacctaaaggcaaccttacaaaatgctttgcaaagttgtggaaatgttgcattccacatggttgtgaatagaaagagcttcttgaggccttgattagagctgggtggagctaagcctgaaacagatgatggctacactacactgcaggcccagctgccctgcccatgggcacaacagcaaacccagagacagtgcagggaggctgggaatgggtcaagtttaaattaggcacaggatttggcaagccactacataaaaatacaacagcccaacagaaggccacgtttgggtagccagccgtcgtcaagtgcaatgtgggaggcgccctgtctggaagagaaaatgggaaagaatccaccataagaacatgactcaaagaggtcagtgatgggcataaaaatatgtccattgcttctcagaaatcttgccaagaggactggatttctaataccagcaagcaccaagaaacagaataagaagaactagattgtcctcctttttctgatgtttactaaacctctattttctaactatattggtggcaggtagcattttctataaaaacctagctttctctggtacttttactttttttctgcctctatagaaatttcaccttagtttatagctggaggaacatactcttcatttaattttcctatctgccttgctgggcaggtggttttggactgaactgattacattttaggtaacaggatatttctcagagacagcatgtcttgctgggtattttgggattcatggaaaataaaaagaaaaaatgaaaagaaatccattcacctttcatggcagtgatttagtagacattctgtggtctctattaggaactgacccgaatagaaagctagattagcctaaaaaaataaaaaaatgtagaatctggtttacaaaactccttagtttctgtttttatgccttagagaacatgtatgagttcaaatataattacaaataagtaaaaatatgtcaggcctatgtttaagtgttttttttttttttgtatttactagcagtgatgtttttgtcaaaacatttttattctctgatctttagtcactttactgtaaaatgaagatgaagtcagctctgcttatctcacaagtcttttgaaagactccaataaaacactgtgtagaatcttcgttaagccttaggtgttcagttaattttaaggtataattttactatctctacaaaaaaatttaaaaaaaattagctgggcatggtggtatgtgcctgtagacccagctacttgggaggctgagatgggaggatcccttgggcccaggagttcaaggctgtagtgagctatgatcacactattgcactccagcctgacagatgacagagtgagaccctgtcaaaaaaaaaaaaaaaaaaaaacaagaaagaaagaagaggaaagaatatactatgtgatagttgttaattagaattttattttgtcttattgaaaaatttcttctcactttgaaatttactagagtaagttggaattattagtttttcagaaacagagagagctggaaagccatctttatgacatccctcattacagaccaaccaccaagtgatctaactggtacatataccttgaaagacatctgataaacacagagcacacctgatgagttaagccaggtggaggtaaaagctacatttttcattaaaataccacagtgctggaaatttctaaaagaccttgagtggtgatagttgtaggggatgccctggccaaagtggcctgtggcgttgcatgctcccacaaaagccatgtaggcaagactcaatggcgttggaaccgtgtctgggcagaatgctctgttttcctttctggaacatggcatgatgagcaagctatccacggctgtcgcaggccatttcacatccacctccctatcttgcaggaggctctgtgtcctgccgaaggttgtcatgaggctctttcccatcaacctacctggtaccagtgaggcatggaattttccccctcgcccttcttggatacagctgcggaccgtaaaaccattcagctctagtatgaaattgacttctcaactacagagtggctcactccctgtgatgcgtgttttccggtccctccaggttgatggtgtcctgtggggacagggatgagaccctgaagaagtatatgctgggttactgaagctgaatcaatgcttttctccaggtgtgtgtatttatgcacctgtcttttctcgaggggactccctaagctcccagccaggtaatatgcacacgatagcaccagaggcaggatggagaaaggaggtcaagctctccaagttcagtaatataggcatgtatttacatgccttttctatcccaggtcttgccactgtctggtgttctcaagtcaggagcttctcagtattttcaaataataaacctctgtggcctccctgggaggctgcatggagtaggggaagaccctggagatctagcttcctctagatccattcttacaataaatccatctctttccagccctgttcctcaatctcatttctcatggtgctgagttccatggggcaaactggttcattaatcacaggtatctccatgttgagagctgggttgtagctctatcctttctgctaaggcaattactgctcttccatcacttcccttcctttattccaaaaaaaaccccacatctttcattcattatttccttctgtcctgttctccttgtccttgtggattaccacctttcgaacatttctttattgcagcttctattggtttggggaagaacgggagactaactctactggccagttttccatctgtaatgataaattcccagcacaggtgggtggaatatgcatccttcttgtattcttagtgcatttcacagaacctgactacagaaggtgctcaaaaaaaaatcagtattgaagaggtggctacatacaacaaatgtacactttggctacaaagttagataaactagcttgttcagcaaacattttcagagtatagtattctatactaggacccttgacactggatgccagggcagataaaacacaattcttattctttattgtcagtaatgtggtgaaagtcccttggaatcgggtgaatctgcaaaatttcagtgggaacaagagcatgcaccacccaggcttatgtcctagtctttccagggtctgggagtaagaaaaagatacagaaacctgattacagtcatacagttaataagttaacagacaacaccctgtggaattaattcacctttcaatattcattataaatgccgtcttccttctttgaatctctgcaattgtggcaagccaagtttatgccgtaccttagcgataaaagtagagatgattaactgtctttctgtctttgtctcttcgttcctttttttttttttttgatagagtcttgctttgttgcccaggctggagtgcagtggcacgatctcagctcaccgtaacctccgcctcccaggttcaagtgattctcgtgcctcagactctcgagtagctgagattacaggcatgtgccaccaggcctggctaatttttgtatttttagtagagatggggttttgccatgttggccaggctggcaaactcctgacctgaagtgacccacccatctcagcccctcaaagtgctgggattacaggcttgagccatcatgccctcctgtctcttagtttgttttaattttaagaggaacaatggtgctttgttttggtttatgccacccaaagaaatagaagtatgcaactttaaaagaaaattttcagccaagggtaaaaacataaaaataaaaataaccaaattggtgtcagatgcaaagaatcccttgaaaattggtgaggattgaggaatagagaaggatactgaagagggatctattattcaaaactcaattaccagaaacccaagttaaactaaaggaagtgggaatttaatgtctcagtagctgcaaagcttcaggtacagctggagccaggtattcaaacgcaattgttaggttcttccctcttctgtactggcttcacgttcagacagatttcattctcgtgtttacacctaacagcttagcaatcagtgcagaaatattctctttccccaacagttctagcgaaagtactggccacaagtctctgacttgccaaacctgagtcacattcctcctcctcaccctcactccagaggactgggttgccctgctcaaaccatatgaaccgagagtcaggtcaggttgttacacaaaggaaatccaaggaaatgttgccaggaaaaggggagaaggcttttaagccagtatatgcggtagctacaattagtgtaagataatactggccctggagttttggctgcatcaccacttaaaaaaaaatttaagttttgaattaagccaaattgcttagcacagaaggctggtttggagtgtagctatttttgaattatttactgagcttcccactgcatttgccccccacaactcttagcatccatctcttgctaaaaggccacctgaccagaatgttaagagaaatatccaatagcctctacagaaagagtagaatatttatttttagctttatgatatttgttcttaaatgcttttcagcctggaatgacttcaatgagatttgtacatttaaaggctgccaaaaaaagaagggggaaaagtcgaatattaaagaaaatctcactcacatccaaaagtggaagattctttaaacttttaaagaaaatgttagttctatttttaactcacttttgggttgtctaaggcttaagactaacataagaagaaataggtcgagcaacaaaaacttgaaaaccaaaagattttatacttgggaattaaccttttattaaccctaaccctaacccccttttgacgaggagaaaaagagagagaaaggagacccttctatgtgcaattcagggttcagtcatctcagaattttccatatacaggccctagatcaggggtgtccagtattttggcttccctgagccacattggaagaagaagaattgtcttgggccatacataaatcacactaacactaacgatacctgataagaaaaaaaaatgcaaaaacgtctcatcatgttttaagaaagtttacaaatgtgtgttgggccacattcaaagtcattctgggccacatgcagcctgtgggccatgggttggacaagcttgccctagatgatttttctaaaaggaaatttgttctgaaagacagtagtcagtatacctttacacaatttcatgaagatgtctgggttatgagaattgtcctactaggaagagctaccaaaatagctcatcaccttgaggtactgtggagtgaaagtgaccaggtgctttacatcaagtttacaccaagctttactttccaaactttttaaactgtcagtacaactccttttgaacatatcttctaggttggctcttggagtgatacatccatcaccccattctactccaaattcatttgaaattggcaattttcaggttccaacttgcgatggcttaacactccaggcctccctaagatggcactgaacatagggcagccctcctggaggaccccacagagaggccatggagcatgagagtgagctgtacctggcatgatgtatgcaacgtggcttattctctttgattcaggttttacgtttctcgaatggagcctcttctaggttgctatccatttacctccccatctctctctctctttgccttttcctggttgagtccttcccgggttaacccagccctcctgatggcttcccttcactttgaaatccacagacaggaacaactctacatttaatgataaactgtcttacattcctccctaattagttcaaattgaaagtttgctctcacatttggaattttagtatggctatgataaatacttgtgggctcctcactcggagcaatctctgaacagacgatctgaagctagatatacaacattctcatatagtgttcagtgtgaatcaatatcaaagtttaaattcccagtgatattaatgaaagaggtgagaatttgttgctcatatcaataagaattagacctaaaatcacactagtgatctttggacttaatttagtgttcattcatttagatacaaactgagtgtatagtttctgtttaaaggaagagtattttgtccgtgatcaccggtgcacccaatggccaattgatttctgtttacattctgataattctttgcttatcagatcatttcacatgagaatcaagccctctgcaataagcagtgggaaaaattttagtcggtgagaaactccaacgcctcaaaagaaagagtgtaactttcaaaactgtcatttttgttctcatggtaaaaatctgactttgtgtcaatcattccccaaatcttcagttgaggaaagaggtcatgctctacattaattacagatgacaagctagagacaaaactaaaagtccaaccttataacttcgcttttctgcctctccctggtcaaaacaaaccctcttataccaactattcttttttatcacttgagtgctatgtacagggtaaaagtaggattacctcagaataataatttcacacataatttttgtaagaaaagggttcatgataatacttttaaaaataaacagctagcccaaatattcctccataacaaaatgtgacaaaaggaagttagaacaaaatcttaatttacacagaaagtaaaactgtttccctgtaaacaagctgggctgtcatgaaaatggataagggttcacagaaatttgacccaaagaataaagaatgaacggatgacacaaaaatggctaactggataaaaatatgttctgtgtgattaataataagtctccaaatcacagtacttggagagaagggatgggcatactactgtggaattctggatgtgtcaagatctggcctgggttctgggaacactggatctctttgttcctctctctgctgttcagggacagtggaaggggaggaaaaagggatcgtggtccagtgtacgtggctcagggactgggcctctggaagccacagggaccagcgatagtcacacttcttcagccctccagcgattgctctctgtttctgttctgttttcacactgttatccttcagcacagctctgtgcgctgtttgcctctcctccactggtggctgctctctgctaaataagcatgccacttgttcactgggtaaagtgaaaaagacgttgcttgtaaaataattgagtctccaaaaaaagaaaaagaaagcgtctggatcactatccgtgtcacccctaccctgagaagtctcttaccggggtgacttttcttcaaagaaagcattttccaaactaagtgcagaatgaagcaaaaaacaggaaagaactcagattattttatgacgtcacatgatgctgaattacagggtggaaagaaacagaaacacagaccactgacttattggagagagagagatatatataccatgtatacgtaatattatatgtcatataaaatatatttaattacatataatatatatttatagatctccatggcctgtgcttctatggaatcaaattgttgtgtatgcatctatgggcatatacagaaatattatatattaatatataaataatatatatgttgtttagatggagagagatcagaggagcactgaccatggaaatatagataatatacaatatatataaaaacatataacatatttttcctgtgatatgtgcttctggtctctgtgtgtgtgtgtgtgtgtgtgtgtgtgtgtgtgtgtgtgtgtggcataaactgatactacaaaagcacagatcaccaaaatagtatatataaaatatatatacagcatattatgtattatataatatgtggtctgtggtcctagatatctatacacacataatgcacacacacacgtaagttatgtgtgtgtgtgtgtgtatatacacatacatatacatatcctaatctggtagcacttttgttgttgttgtttagattcagggggtacatgtgcaggtgatctgtattatttattcttccttgttccatatatattagattaaccaagatttaaatatcagctctattactaacagtaacacctggaccaagttatttaacttctgtttacttataagaccataaatatataaattaatacatttaaggaatacttactgaatgctggtagagtatgagcacttaataaatgctagtagttgctgacagcacttatgaccaaaacactttcacaatcatatatgcatcagagccagggctgccgtttaaaatataatgttctcatttgcaacgggagaaatggcacgaaaatccaggcccctctaccaccggtatgtactctttccactactcagacagaggaatacttacatttgaatgagaatatccaatcttctaaaaattaactgtaaaccaaacgacaaaatttaaatggagagtgtttggggggctctggaggaatttgaaacttgtatttaatttcctggctcttcatcctgaaatgcgtctaagctagtaacagacagcaaaaccgagttcctatctctctagtgttccctgctgagataaaagcgatgtgcagcaccggatgccaacagagcaaataattacactgagtgctctttccacagccaatgaatcggaaagtgaaatttttgtggatgcacctgagtgctggggacatcagctgtcctatgagaagtcattaacattttctgaatgtctactgtgtgccaaacactgattactaaagaggacgcaaattgaaatgagagattattcttgtactccaggtgcttaaagccgttattaaggatcatatcacatgtccatcgagaataaaatgtcaggtaagaaaaattccatgaagaagaacagagtgctaggaaaatgcaagaaaaggaatgattaatgccagctagcttggggagggggctatgatgagagaaaggctaaggacagggacagtgagacagggacagttctctctcctagaattattaggaggtaaaaatttggagctcttctacttatgattaaacagaaagaggcatgaggagaaaaccaaatgatgtcatcagaataaaaaggcactgcaaaacagtagattatacatgcaccttgaatgtgctgtctgataaatcagcattttacaaaaacacatccggactagcaattcagaagaaagcaatgttaatgcattaattcaaagagagcaagccatccccaccctcaccccataggcttttatttatttatttatttatttattttagcagcctataatctctaggatttaaaaaaataactcaccaatgaacagaattaaacttctcaggtctgttgctttaaagaatagccaatatttgtgagaaacaatttcaagagaagattactacaaaatgaaaatgtaatatgtctgcatcagttaaatctcccaaaacaaatttgcaatattgcctctgactttgacgattttattctttcagtaacagtccagatggcatccaatgagtattgacatcatcatcataaaaaaaggctaagaaagtcaaaatgggatttatttaggacaaaaattaatatcaatagataatgatcttaaatttaaaggatgaggcatgaaaaaaacaattaataaaccttttatcttcctggaagatttccatttgatatgtatagtcatttgttgtgaggaatagaaaaaaaaaaagacacattaaagagtgtaaaaggctataaggtaccttgagaatgtagaaaataattattatttaatgaaagtgatagctaagaattcaaaaaataccctttggctatctgataagaaaacctatgccgatactatagcaaatctaacataagtaattttttggccttgcaatagattaactacctaggacgtaagaaaatgtctaaatctgggcttaatccaagcctctggaggtggtaataaagtcattaataataatggtaaaaactataataatcttttcagtttttgctcaccttctatgtgttccatacaccagttagaaatactgaattgtccagtgacatcaccataaaaaataaggataaagtccaaatataccatttttttcttgttcatctgttgtgtatgcgttatccagagtcactcttttagaaccatatatatttttaacacatgactggtaacaagttctaccttttaattacataggctaagtaaattactaacatctcttttatgtctgaaagcttccttttcaaggaatgccttcttatggaacctctcaagctctgtgaagtctgcctgaagactggatttaaaaatagcataaaatggtcctaatttaatttatggcctgaggagcccatattcacgtggtttcgaatatgggtaggattgttttctttttctgtccaatatcctcccacctcactcaagaccttacgtggtcttattgatcacgggagcacactggagcggtgactttatgaactaggctatccgtgacccttgggtccctttaatgggccttaactgttagtgctgaacctgccctcccaaaagtcacctttgcattatttttcataaatgtattattttctatgtgggtcaactggatctctcttgataactttctgttcttcacatatctcaatgttctcatctttttttctttcttggcttagatgcccactttttagtacagtctgacataatctgcaagtttgaaaattccagatgcctataaagataacatttaaatgctagctaagataaaactcaacaccagctgggatcccccaaacttccagaaagttgtttgtttatgcctgcactatgtttgctgccttttatgccactccttaacctgccaaaacagtcccaaacactgccatggagaggcctatttggggtagaaatgtattagaggtttggggaaacactaaataaagtacatcgatttcccctttcctcaaagtcaagaaacaaagttacaatcttagtgaagttcaatatttcttcatagactcttggccttgtgcctgcacaatgaatggatcacgtcaggttcccatgtagggatgagagaacaggaagttcattcctatgattcttggagtctttttcagagagtacttaaggataggcaaacagtattctgtaggcacagtgatatatgttgcagaaaaatgtgcattttggtccatcattaatgatttactgttgagtacagtttacaatcttaagtaaaataattcatctccagagatttatttactgcttttggccacacagcaataaaatgatttggttgtactgagaagaatttccctttaccaaggccatcacagggagaaggtatggtgttccaggtaaaggatagcataatagaaccatttcagtcaatcaacacagttggtagtcagagagaaggcttctttgtagatgttgatagacatatttatgtatttggaaagaattttccctttatggaatagagttattcagaagacaaagggtccagctaagtttgggaataagtcgatacacctgagttacttgcacagaaatatctcaaaggaattattgtaattatgtaattattgtaattcccttgagatattgtaagtcaatggaagctgtgaaggttttattttcccaatccaaaatcacctccagtcccaataatattcactccaaatataaaatggcaaattcacatgttcagaaggcactacacagaagcagcaccacaagcgacagctatctaggaaaagaaaacagtccctgagactagaatatatggctacaaagaaaaccaaagctaaaatcaaagcatttagatattgccaattttgtactgttccttcgaacattctggtgaaaataagtcagagcttgtctttcatcttggtcgtatcagatggatccaaccacatttaaaaacaaatcatttctctaattactgtgatggttactagaggctgggaagggtgaggggtgataaagcgaagttggttaacaggtacaaaaatacagtctgatagaaggagtaagttctagtattcaatagtacattatcgaaattacagttaacaataattgttgtgtatttcaaaatagttagaagagaagaattgtaatgttcctgacacaaagaaaagataaatatttaaagtgatggatatcccaattaccctgacttgatcattacccactttatatatgtatcaatatatcacatgtactgccaaaatatgtacaactatgatataagataagataaattatttctctacaaatacaatgagaactttgtcattgcccagcaggatttagctattagaaaaagaattatattaggctgggtgcagtggctcatgcctgtaatcccagcactttgggaggccaaggcacacgggtcacttgaggtcaggagttcaagaccagcctggccaacatggtgaaaccctgtctctactaaaaatacaaaaattagtcaggtgtggtggtacctgcttgtaatcccagctatttgggaggctgaggcagaaggcttgcttgaatctgggaggcaagaggttgtagtgagccaagatcatgacactgcactccagcctgggcgacagagcgagactctgtctcaaaaaaaaaaaaaaaagaaaaagaaaaagaaacaaaacaaaacaaaacaaaacaaaacaagacaaaaaaaaagaaaagaaaagaaagttttatgtcagagcccaagtggttgagattaacattctttactatttctaaccacttcaaggtgctaatttacaataaggaaagagtaacaaccattaggggaatatagactctttcatagcaaggttaattgaagtgtccatttgactatgtgacatctcactttcccctcttgttccgcagctcgattggctatgtagttattatgtgcaagttgcatagttactcagttctgtcagagaggatgtgtgaagaagatgaaaaagaaaggactagctttttgcaaattggtcatgtctcttgcggatctagttaacatttcctgttttctgcaagaattaatttttttcctaatgaactttaagaactaccaatatttttagtatactctttctttcttatttatttgtacattatctgtttgtatccttgaattttctctgggatgttataaaagaaaaatattacaagcataatttctgacacaatgttttataactgttttcaaaagcaatctatttctctcttaatttctatagaacccattttagtcattcctatgatgaatgaaaaaaaactcacaattagttgtcagtttcagaaaggagtctcagaagcatcttagaaccacctaggcggtcttataggcgtcacagaaaaatattccaccttacttattcttatcttcttcaaactgactccaaatataataagcaggcttaagttatataaggttccttaaaagttgttctcaaaaacaattaaatgcagactgtcctcagtaaaacttgcattggcccagtccattttaccaagtttgctccttcttacatgtacgactgcccctgtgacaagtttaagcctacgttaattaatcatctttccataacactgagacatattcatccaaccctgagagggataaggggtaacaggcaagatatattcaaattgtgacatttaaggtcaacttgactttaaaactcatatactgctcagttttcatatacgtggctgaaaacaagtcatcacagagaactggtcacactgttagaggaccaaaatagtaaaatatgaacaattcttccatatttaatgatattaaatataacaggtcctatgtctatgcaattgaagtcaacatgtcactaattagggcttcctttgttatcaaacttgctgagaagatagaacagtgaggaaaaaatagcaggaattgagctgtacagaattaaagacattcttatgaaccttaagacttaaggtcagtcacactcatatgacatttggactattagacaactcttctgacctcaaattttgctcttaccagttggtgataatcctttggtaagagagcatgttaaaagtaaccaaatcagataaggactagaagtcaaatttcaacagaagagggcaatgagactccgtgccttaattatcaacatttttatgatgaagaaccttcctaaactaatgaaaaatacaagacagaaacagatgaaacacagaaatggctgaaaagaactccctattaatttctgaccattttcttccctattaacagtgcttgatgatctggagtgaatacctgcctttttggctcctgccaattagttcaggaagttccatcttcaaacacattcagtgacctgatttaataggggcctttttatttgatcgccgccaacaggcagtcctacagacttttataatcacagtgggctgctttacaggcaagtcaaattccagtttaatgaaaacctacatcattacaaggaattgagaagggaattctggtttcttttctgctatggcttacactggaagcatagtaactttccaatgaatccatgcaggagaatggaattcatccaatagggaaagcctcatttttctctatggtagaatggtagaattaatgaatatcaagaacacgagaacattttgtaacatcctgctggttaagtatgtttcattcctagctaggttaatatggataggctgggggcagtggtggtggatatttccagagatattacctgaagtttaacaaaacattggttttaagcttgtacatcatgaactcggggacagcttctctctcacactctatttatttatttatttttgagacagagtctctctgtcatccagactggactgcagtggcgtgatcttggctcactgcaacctccgcctcccagggtcaagcaattctcctgactcagcctcccgggtagctgggattataggcccgcaccatcatgcccggctaattttttatattttttttagtagatatggggttttgccatgttggccaggctaggctggtctcgaactcctgacctcaggtgatctgcccacctcggcctcccaaagtgctgggattacaggcgtgagccaccacacctggcctccctcatactttcttatgcaccaatcatgacccattttgaaagaggcagagtggtggaaggtttggacttcatgtgctgactggttctctttgttaagactcaaataaaaccactggagtcctatccactgaatgctagatctcaagacatagcacaatgggattcctggttacttacaagcggtctttatggttccccagaacatcttcccttgagcctgcttcccttgctgctccaagtgaactaaggccagaaactaacagcaagcacacaggaactgtgggctctgtgctcccctcggtgtttctgttccatagaggcccatcatctttagcgacttgattttctcattccacacacaactccaacaggtatctcatgtattcattggtttcaaatatgtgtgtgaataaatccctctaaatttcagacctgtatatccaacagtttccagggcatctcatctggttgttctacatacgttgcctgaaagtgaatatagccaaaacatatcatgccttcgtcattctctccatgaagaaagaaaggaagagagaatctcttgtgtttcccaatgtgaaaggcatagtggtgcattcattgtcaaagtcatacatatgggtgacatcactgttggtagggccttctcccttaactcacctgcccccctcacttcccgcaccaccacccctaatcctcccattgagttagtaatgaagtccttcctatgtcctgaaagtctcccgtgcatcctattttttcttaaatctcactggcctgccttgggtcaagccttcatcatctctgctctagactacagccacagtacccagccttgtctcccttttctaccatctgatgtttattctctacatttccccccacccagaggaatatgtttggaaaaaaaaaaagaaaaacaaatactgctatttccctgctcaaaattttcaatggctctttactcttttcaggatgaaatttgaactcctccagattctaactgttgtcttctgccttcctctctggagtcatccctctgcactttccaaacacctcatcctgtgcaaaggtcacgcgacaatatttggagttcccagagctcgccagaccctttcacaccttcgagctgttgcacaggcgctcctcttttccctggctaagtctgactcaggctttacaatgaagctctgacatcaccatctccaagaaaagcctctgaccccaggaacctgagtgaaattccacacactcctgcagccctctgggtttacctctattgtggaaattatctcactttcttgatttgtccttctcctccctagactgtgatcccctcgaggacagacagcatggcttaattctctgtatcgctaggcctgacaaaacgctcacacacagtaggctcctgaacgatgtttaatttattgttaacacataggattccacagatcctgaggtacagcagacttcagatacccacttcaaagaaaacaagggagtaatgcctaggttcttgttcctatgatttatactgtgaataaaataatttcagagaagttcctttattcacttgaacaatatttaaagggcaaaaaaaattaacaaaaggtctttttaaaaatgcaaataatttacatttgttgataaagccatacaatcacaaaagtgaccatatgaatgcaaatattccttctaaaaagtataattattattcacccatctaacaaatattaatgaacccctctgatgttagatgctctttatggtacaggggttagcagagtgggtacatggaagcttcctgtagtttacactatcatctggaaggcgattaatcaaatactacttactgttcatgagtttataattataaaatggagggaaatactctgaaagagaagagtgtggttttataaaaccatataagaggctgggtgcggtggctcaggcctgtaaccccagcactttgggaggccgaggtgggcagatcacttgaggtcagcagtttgagatcagcccaggcaacatggcaaaagcccgtctctactaaaactacaaaaattagctgggcgtggcagtgcatgcctgtaatcccagctactcgggaggctgaggcaggagaatcgcttgaacccagaaggcagaagttgcagtgagctgagatcatgcaactgcactccagcctgagccacagagcaagactccatctctctctctctctctctctctctctctctctatatatatatatatatatacacacacacacatatatatatacacacacacatatatatatacacacatatatatatatacacacacacacatatatatatatacatatatatatagaaactggcttagacctaaggtgagtgggtctcaactgggcataggggaaaaggagggaaagcattttagatggaggaaaaaacagggcagggataaatcttcaagaccagagtggccatggaaaagtcacctctataactagaatcaagagagtgagagaggaagtgataccagatgaggtctgagaggcagggagggactgatccaggatgctgcttaagggtgaagaggatcagaacacgccaccaaaaaacataccattttggcatactgattattctgaggtaaaggcaattgagaaacagaaaatgcatgaagggctctccacctttcccttttctgcctaaaagcaggacataggtaaacgtacccttgccaaaccccaaaaaccagagactaaaatgaaacacagtcagagcccagaaatcatattttaaccatgaacaccccaacaattaccccctgattgacgtaattttcctaaaaatcttaagcccctccaactaaattaatcctccattttgtataacaaatataaaaactaaacttccaccgtaatactaataccttcagcatatccctctgaaaatgtgtatgtttctcctgttaatctgtcttttgttatcttaattagtaagaaccataaacagaccataagagagaacaggagcactttgggaggaagaggtgggcagatcacgaggtcaggagatcgagaccatcctggctaacacagtgaaaccccgtctctactaaaaatacaaaaaattagccgggcgtggtggcaggtgcctgtagtcccagctactcgggaggctgaggcaggagaatcgcttgaacctggcaggcggaagttgcagtgagttgagatggcgcgagttgagactgcgcgactgcactccagcctgggccacagagcaagactccatctctctctctctctctctctctctctctctctctctctctctatatatatatatatatatatatatatatatatactggcttagacctaaggtgagtgggtctcaactgggcataggggaaaaggagggaaagcattttagatggaggaaaaagcagagcagggataagtctccatgaccagagttgccatggaaaagtgacctctatagctagaatcaagagagcaagagaggaagtgataccagatgaggtctgagaggcagggagggactgatccaggatgctgcttaagggtgaagaggatcagcacaccaccaaaaaacataccattttggcatattgattattctgaggtaaaggcaattgagaaacagaaagtgcatgaagggctctccacctttcccttttctgcctaaaagcaggacataggtaaacgtacccttgccaaaccccaaaaaccagagactaaaatgaaatacagtcagagcccagaaatcatattttaaccatgaacaccccaacagttacccctcgattgatgtaattttcctaaaaatctaagaccctccaactaatcctccatttttgtataacaaatataataactaaacttccaccctaatactaataccttcagcatatccctctgaaaatgtgtatgtttctcctgttaatctgtcttttgttatcgtaattagtaagaaccataaacagaccataagagagaacaggagcactttgggaggaagaggtgggcagatcacgaggtcaggagatcgagaccatcccggctaacacggtgaaaccccgtctctactaaaaatacaaaaaaattagccgggcgcctgtagtcccagctactcgggaggctgaggcaggagaatggcgtgaacctgggaggtggagcttgaagtgagccgagatcgcgccactgcactccagcctgggcggcagagtgagactccatctcaaaaaaaaaaaaaaaaaaagagagagagaacaggaaaactttttttcttccatagggatcttgtttggaatttcggtcttaatcctaaaatcaaagatggattttaattggacaggtttgcaatttgaaaatagtagtgtggctgccctttggagaaaggcaggatgaggtgcaggtgcatgtggagactagttaggaatcaatgagatagttcaggtaagcggagataagattttgcagtagagaaatacaagcatacatggtccaagctaagctgacagcacttgtggatgcaacagatatgagaagagggggataagaagagtcaaggcgaccccggcatttctggcatgtgcaatttttactgaggcagaaaccagggaaggggctgagggtaagacaatgactctcatcttggacatgtgcagtttgagacttctttgacatacccaagcgaaaatactgtatacacagttgaatttactggagttcagagaaaaggtctgaattagaaacatacatttagaaatatttaatttaagccatgagacggatggcattgccttgagaaaaaaaaagtagagtgagatttccattgatgtgttgctatttcaattaccttgtaaatagtctagtttattattatcttatcctattaattgttcttccactctttctccttcactgggttctctgaattatagaatttatgcagaaaacaaacttggagatcatcagatataatctccaaattttacaggtgaaaaaactatagtgggttactcaggatcacactgctccttagaggtaaaaatgaagacaaaagctcaggtgtttttgatgagtactccacaggactacatctggaacaggagcatgttgggagatgaatgtaagagtcccaggtacccagaatcctaccaattctgacatgcgtgtgcttgtcataatgaaacaacacaggacatcatgtgaaggacaactaacgtggggttacccatgaggtggtgagaaacagaatgggattttgcctcaaacccactgtggtttacacattagtaaactgttcaaaatggggccaaaagcttgaactctctgaccctctatttccttctctaggaaatggagaaaagcaatcattaccttgaagtgttgaaaggaataaaacgaatgtatttaaagccactaaccacatagaaggtttccaaattactaactaatattttcctccaaagtaaagaaaaaaaacagatgtcatcaaaataataaagctggccgggcactgtggctcacgcctgtaatcttaacactttgggaggccgaggcaggtggatcacgaggtagggagatcgagaccatcttggctaacacggtgaaaccccgtctctattaaaaatacaaaaaattagccaaatgtggtggcaggcacctgtagtcccagctactcgggaggctgaggcaggagaatggcgtgaacccaggaggcggagcttgcagtgagctgagatcacgccactgcactccagcctgggcgacagagcgagactctgtctcaataaataaataaataaataaataaataaataaataaataaataaataaaaaagctggccggatgcaatggctcgcatctgtaatcttaacactttgggaggaagagacatgaggatctcttgagtccaggagtttgagactagcctgggtaatgcagtgagaccctatcactacaaaaagtttaaaaaattagccagatgtgttggtgcatgcctgtagtcccagctacttgggaggctaaggcaggaagattgcttgagcccaggaatttgaggctggagtgagccatgactgtgccactgtgctccagcctgaatgacagaatgagactctgcctcaaacaaacaaaccaaaaaaccaactttattatttaaaaaaatctcaagggctcattgaaattatttggaaacattaaaatattttttaaaatattaaaaaagcaattattccggtcatcagggtttaaagcctatttattatataatgcacctaaaatttataaagcacccatgattatgaatcaaaacatctatatccaaatagtatttgatattattatactgtaatgtattttctagaatacagcacacaagaaaccacgtgctatttcaatatcttgttaagcaagtgaaaacctatgttgtcagttttaattcactcaaatatgcctgtagccaaggtaaatggtatagtttaaaatagtaccacaaatgaagcaactatcttacaaatttaaaattaatcatttcctcttttattcataaacttttatgcttcatctggatttggatctctattcttctaaaatttagagttttaagtacaaaggattttttagctggtatgagtgttatagtttgctttaccaaagattttcagatgagagaatgaataaacattgtaagttacaggatatgaattccagggaaagagctatcatgcaagaataagacttatggatttcatttacagaaaatcttcagcaaaatctacaaatatatttttagctatatagttattttttcaatttgaagacataatggtgttaacagtgactgagcacttttatgaaactctcatggaataatatttgaacttcatctttttctattgtggtagagcacttgttcaaagccaagatgtatatccccacttgtatggggcagattccgggcaaaaccactccttaccacaaagcagacacttctcagatgcctcttcaggatttattccttacctgccttcaaaatatgatttgaagcaatttacaatatagcccccaacaaacttaaaagaacaacaataaaagatagaaaaaaaaaacaattagaagacaaagaaaggcagatatgtcagggatgaatcacatgagaaaaagaaagaatggaacattaaatttagcagtgaacttcttggcaactacagaaaaaaggaaaaggaaaatacaaattatacattattgtttttaaaaaggaaaaagtaaagtttatcttcaaagacacaattttttagtagtttattataaaatacatttattttattgtttttttcattagaaacttagagaacatgaaggaaatgtcttttagtacaatttcgcagaaatcacaaaataagatacaaataatcatctatctgcctgctctaaaggctttgatactattatactcaaacttcttaaaggtttttttttgtagttaaggacagacaattcaagttctttgttgaagatgagattacaaagttatagcctttaaacagttctgttcctacacctgactttttaaacctctgctaaaggaacttaccttggttcctcgtacaagttagttacacgtttattgctaatgtatatgtaatctatttccccagcaacggtaaaatactagcccacaaaacccagtatagttactggaacatagtgagtatttgatcaatgttcattgcattgaattaaaaatataaagaaaaacgtagttagcatgcatctaagaccagcagacaccaatcccatatttttaaaatcagcttaaaaatacatatttctataacctgagcttaatatttaatctaggggaaaaaataaataaaataaagtaaaataaaaacaaaaattatagattccctggttccatctcagcactaatgaattagaatatctgtggtttgcatttgaaatctgcattcctaagaccttctccagagaatttattgcagccatactccagagtggcatttcatcaatcccaaatattctccttttataacatttttcatgtacactccttttttttttgcaaccataaatactttgtgtccaatacatgtgctatgggggatgactcctaggtataattagaagaaatattgagatgggaaaagtttaagctagaaaagggaagtcgaagtcgaaaacatagtgaaacaaaaggtagatgttttactgtggaggattgaaggagatgaagaaaccagaaggaagtttgtgcagactgctggactgtgcctgaggactggggcaagagctgcaaagctaccagtaacccagtactctctgccttatcttctctgcttctccttccttacatgcttcactgttctcaactgcagacaggcttcctttgctgctctctgcacaggggcattacccagcccctaggttacattgcctcagtgccagacatacataaacacacacacacacacacacacacacacacacacacacagagtcacacacacacttcaccaaagttctgggaatctcaacagaagcccaggggagagagctgttagtcaaattctataatgtacatacaccactgatctcattccctggccctgagacaccaggtcacatacaacctgtgcagctgcctgagctatctctgcagctgagaaggcacttctggagaagaaggtaatgctgtgactggatgcactcaaggacatttctcatctcagagttcaaggaaatggcatagaggaattatccaaagatactgtcctatggtcttgggactatggaaaccaggaggttgaaatcaacaactctaaaaccaaaacaaaaacaaaaacaaaaacaaagaaaagtcttagatgtttcactggacaaaatgcatttagcaggaaaaacaaaaacaaaacacaaaccctattattaggtagattatatttgtcattgcattctttgacatgatctgggtctggattgcagatgttgcagggggaattggattatagcatcactttctcaacacagctgttttcacttgaggtggatatgggcattacttggccaccatgacctatgttttcctttgaagcatgggagttgtctggtggagttgggtagtgttcattctcccacaaagctgttgacagctatcaatcttaggggcaacagagactctcagcttgggagtaaaggaaggagaaagaactagattattcttcctaactgctttttccttccccaagtaaaattttttttaaaaagtcattagataggctggggtggccttgattgaggccagactgcagagatgattagagcccttcaaagaaaaagattggcacaagcaaggtggccactgatcccagagctctcaataaaacaagcatgctccccggagctgcccagcttctctgggtgcattttaaggcaatatgtcttaaactttagtgcacaaattgaggttctaatttagtacatctgggggtgggtccagatactatattttcttttaaaattaacaaataataattgtacatattcatgggatacatagtgatgttttgatacaaataatatatgatggctgggctcattcctataatcccagcactttgggaggccaaggcaggaagatcactggagcccaggaatttgagactagcctaggcaacatggtgagatcttgtctctaccaaaacaaacaaacaaaaaattaaaaatcaaccaggcatggtggcaggtgcctgtggtcccagctacttgggatgctgaggcaggaggattgcttgagctcaggagggtgaggctgccatgtttgcaccactgcactccagcctgggtgacagagcaagactgtatcaaaaaacaaaacaaaacaagaaacaaataatgtatggtgataaataatgaaaagtgagaaatgataaacatttatcctttttgagtaattaacatatccattatcttaaatatttatcatttctttctgtcaggacggctcaatgtcctcctagctatttgaagctacacaacatattattgttaactatagtcattctacggtggcatagaacactggaactatgtggctgtaatttcgcattctttaacacatctctccctgtaagtttccaagtgattctgatactaatggtccatggaagtaatgaggctttaaggagcacaaattggtaacttgagaaagttagatttacaacatttgcgatccttccttccgtgtggaacagtccatagcaaagattgactccagtctgcaacaactgcactaccctcctttcacatatggcaggacttcatcacaatggtttctggttctactaagggcaataaagtcagcggattccttgtttcattagaagctctgcagtagaccatgaaacatgctcagggagagaagggggaagctgaaagagctgggaaagccagcagtccgttgcgagttgggccacaaaagaatagaggaattaacaatccccacagattataagaaaaatctggggagggatactaactagaaaagactgaaaacttctagtaaagtgaatggagcttgagaacattataatttgggaatattaatataaagaagctgataagtgctagacataatactagatataccaactaaatccacgacaaagcatctaattgaacctacgaggcagagcacgcctgcaaagtttccagggaatataaaatgattacttggacctaattacattaacgtgaaaaatgtcattgatattctctttattgaatagctaccactgttattttacagcagtgaacattaaaacaattattagagattcccaggttaattctcaatctatatgtccaatcttatttttcaattaaaatcttaatgttgtcaaccaagaattcttccaacagcttgctgttgagatatttgctatctgaagaactcaatcaaaaattttagactccactagagtgggtatcacaaaattgcagccaaacttaatcagatgagcaaagttttttgtttagcctatgtattttcataattcctgaattagaatgcctctaagcaggccatacacagtggaactgaccagttcccagtgcaggatggcaacgtagtgcatttatctgcctgaattctaaaggagataagttcacccctttcattagctcatcaatatatatatgagtaacatttttatatgcgtgtttagatgtggagttaactctgaatccttgaccaaatggagcttaaggtttagctagggacatgtgcaaaataactctaagacaaagtggagcgtacaagagatgcaaaaaccaaggcctttgagagcacagaggcaaaagcttcaggagagttttcaccaatgagctctctgaactgactactgaagaatggatggaatttaacaagcagaatggcctgtaagtgggacggtgaggagaggagaaatggagtgaagccacagatgtaaaaagtgcaaggcatcattgagaaaaagcaagaaactagaacgaagtgggcataagagggagtaacagggaaaaaagaagacacattttgttagagcaaaatgtcattccacagtagctctcctcagctccaagctccctctcttctctctgacagcaacacaggtatcaaaccccgacacggaggccgcttccctattattcctgtcctgatctctaccctcttcctaggcttgacagcttcctgatcatgaatattctcttgatcctggtcatgaggaagcagcctgcaacccctgtacaggaatcccatgaagcacccttcccagccacactcagcatcagccgccttcttctccctcctcgctgctgaggcttcgggctgtctgatctcacctctttcctaagctgtgccaggccatgccccagcacatcccaggccccaaaactggcactttcactgccccctggagtcagagcacagaggcttatcttattactcttccttgtgtcttgggtttctccagtcattgccaatcaaacccgcgggggttcctcattttggataatgattctttcctctctcagtctcctcattttaaaataaaacaccaacaacaaaaaaatgaaatccattgggctatgtcttttattctgcatgcctagttattcactaaaccctcacgctctttcctctctattccttcagcccttggatatcaggacctgggcacccaaacctgttcctgcaacagccttacccttgtcacagtgctattgcccttactgaatgccaatttatcccgagcactttcatcacaatatcctctgccaaacattttaaatgtctccatatttccccttttatcagaattagattctttggctagctttcacagaccctcataacctgacccaagttctctacagtttggtcactgtcgagttcggtgagcacagttggtggtgacagcggtcttgagcgagtatggctcttcctcatctttcaaacagctcaccactgctctgcagaaaccctttccttactccccatcagtcaggaaaaagaaatcactgatttttttcaccctcctaatttccatatacaaccttcataacattgttttttatacgtctttatttattttaatattgttttacttcgcatttgttcattcggtctttacaaactaacctagagcagggtcatgatttttggcgttttgttttactatcatttcaagtgtttcacatgataaatataccacaggcattttataagtagttactgaataatggattagagacagagtttcaatagtgaacagctggaatcagttttaaagagttatctaagaggtacaggagaaaacagaactgtgctccatgcagacttaccagagaagacgctaggtatcttggaaagaaagcttttgaccgtacgaataggaattccatttttttcatcttgcatccgtgctatgacgtcttccatctaaacaataataacataattaaaacctttataaagttgaacttttttgaaaaaaaatcagctctcataacaattttgtattcctgttttgcccaactaagaacaatgccgtattcttgcctttctagtttttgccacattaatagtttaaatactgttaaaaagagatggaggaaacagcaagaaaaacagccatgttagggcccattaagctaccaataggaattttgtgctttgaatattgcctttctcctgatttcatgtaccttggttataaaggttaagatcaaagagtgtttatttcacaaggttttagaaaccattgtcatagcacattcatgcttcattaatgttacctctactgaaatcagtgcaaaagcaagtagagccttaaaagcatctgcttgaattgcttcttcaagcaagagaatttccgtgattttgttttacaataaagttctaaaacctgcctagaaatccaggactgattgccaactactattacatctcttgcccgggtacttactgaagtgtgttatgaaacaaatacacacacatacacactctcatgcacatacactcatgcatgtgcacatacactccacacatgcacatgtacacacacacatatatgcacacaagtacacatacacgtgcatgtacacacacatgcacacacacacatatgtatacaataaaatgaatgtaacaccacagccttctgtccgtttactagattcccctttatctttgtttcaatctcattagtacactctcttttacttttacaaattgctggtaattctaaagggctgtgcttcacaaagtcaatgtggaatttagttttgaagaacattcattcattcaaatcatagccacagacattactcatgtgcttctaaacctgggagatgcagagacacacaaacatacccaagtggtagtatgggacttaaaatccattcatccatttactcattccacaaccacttatcactaactctacaccagacatatgactgggcaccgtggatatgaaaatgcatacaatacagttcctaccctcaaaaaattcagtcaatagtgacaaccaaggtgaaatctgagtaaagtatgtagtttagctaatagtgttgtactaatgttaatttcttgttttgataattatgccatggttatgtaagatattaacattaagggaagctgagtaaagagtgtatgggaattctgttatcttttctttttatctataagcctaaaattatttcaaagtaaacagttaaaaaaaacacagtctaaactttatattaatgaattatcaaatttccattggccgggcgcggtggctcacacctgtaatcccagcactttgggaggccgaggcgggcggatcatgaggtcaggagatcgagaccatcctggctaacacggtgaaaccccatctctactaaaaatacaaaaaattagccgggcgcggtggcaggcgcctgtagtcccaggtactcgggaggctgaggcaggagaatggagtgaacccaggaggcagagcttgcagtgagccgagatggcgccactgcactccagcctgggcaaaagagcaagactccatttcaaaaaaaaaaaaaaaaaaaaaaatttccatcaacatagctttagaatggttttcagctaagaaatctaatgttcttggtatcaacggatgtattactatgttgtaatcacactatgaacagatgtattactatgacaaataactggagatgtggaaagaatgggttttaatgaaacacaggtttgtatttgactcttagctcttgtaattattatctatgttctttgagtaagttaaataacctctctaagactcagttttctgatccataaaatggtgataataatacttgtaataatttcttcatagcgttcttcatgggattgcattgggcctagggtggggtaaagtattttaagggcaaatgatacaacatatataaagcctggtacatatatagaacaacaaatattagaccaaatgtccatgcacacccacgatatctggggatgcttattctccaccttcatgtttctttccatgtggaaggagcgccattaccctaatccccttgccttgtctctgccccctaatttactccaggggagctgagctgacttatcagacagaagagctgggaatgagaaactggcctgcagggcccactctttttctcttggctagaagcccacatctaactctgctgatgtagagatgcctgccctagtgggtaagcaagtctattcaggattgtgtttcaggattaacagtgacttgtgcacaaacattcttccataatacctttatcagcaatcagggtgatgttgtgacccctacgtgcctgtctttatggttatagttctcagttggctcagaaatcaagtataaaaagaacatgatgctgggcacggtggctcacgcctgtaatcccagcactttgggagaccaaggcaggcagatcacctgaggtcaagagttccagaccagcctggccaacatggcgcaaccctgtctctactaaaaatacaaaaattagctgggcatggtgacaggcgcctgtaatcccagctactcgggaggctgaggcaggagaatcacctgaaccccagaggcagagcttgcagtgagccgagatcataccactgccctccagcctgggagacagagtgagacttcacctcaaaaacaaaaaataaataaataaataaaaaagaaagaaaaaaaatgattttatcaggcctgtaaaagaccccaacaataaccaaataccaaataccccacttcttttgtaataaagatctgtaataaagatctctaagtatagaaacatgaaaatagacatactctgatgactttttattttgttactatttgttcatgactgacctgccacaatgttcagaaatgcagaataagctgctttgtcctgcctcatatcagcctctaaacccttgtattatctgcttaacggtttaaagcaggctggattagagggacatggaaacctctctgactcacactttcatctcagcacctagagatgtggcagcagtcacctctgcttcgggctgaatttaggtgcgtagctatgagtggcagtgttttctttgtatagtctcatcccctctcagttcatgggatcccaaaggagtgagaataggaggctggaaagtaaaagtgacttctgtggttgtattccaaaatattccatttttctgagtcatcatttccacaagagaaaaaaattttaactccaagtaaaaataggattggtgttctagactgaaaacgtgatcatgtacatgcattcagctgtttttatctttatccagacataatttatccgtgaaccttctcatggcctagaatgagacaaaaacaaacaaaagaaaacaacaacaacaaaatgaagaacaaagacacataaaaaaaacccctgctttctaaaaactaaaatcaattaaaaagaaaaagaaaattctagccctcaaatgactgaagggaccccctcttggctaacgggaccccagggaaaccctggaagctaagttcatggccatgatgggatggggggtgggacacacctcgttgtaccccttcctcactaaccactatcagcctttcttccctaaggggcaaacagaaactgacccttttgaaagactccacattgataatgttgattaatgacttatcttcccaggacagaacaaagctaaaatgagatcagtcattccttcactcctctctgggatgtctgctccctccattcccttttttttcaaatgttcaccttatcttatgtaaaaagtaaacttacagggcactaattaaagtctcgcaagtatgtaatcattcctctcactgttgcctcctcttttttaaggaaaatgtataaatactaaacctcctaagaacctctgggaaaaacagccaaacaggcatccataacttgtcctcaagctggctcaacaagcttcagtgattgagatttatgtctcaatcactcattttggttgtcacagtcaccaagtccacataaaaaaacacatgcatcttatctgttgatgttccctcgagcattcactcagagtctattaatttttatattaagcatgacttgaacatgcttgatggtctgttttcccactattagcaacagcaattggatgagaagaaaaatgctacaagcaagcaaaaaaaaaaaaacagagcaagttagttagacagtaagaggtatgagggatagtaaaaagcaactccaataaatatgaaaatatttggggcaatttagtctaaggccaaaagactcaggtacctcaagtatcccatatatatatgtatgtgtgtgtatatatatgtgtgtatatatatatacttacacacacgcatatatatgcatgtatacatgtgtatgcacacacatatatgcacatgcatatattcattaaaatgccattgagttgtgtgttttcacttccataagcctgtttctgagggtgaggaaactgggcatgggagaagagaacactagacgatgggcatgggcaggagagctggcatgccttgggtcaccgaggatttttctgaaggctattttctttactcttaagaagttcaaagtagatgatctgtaagacttctcctagctacaaaatgattgaagtctggaaataatcatcagcattcagaaggaggtaagtttccacactaggtcaaagagccaattccctgttacagacaaatagatgaagctattaaattaaataaaaccaggccaggctcggtggctcacgccagtaatctcagcactttgggaggccaacacaggaggatgacttgagctcaggagtttgagaccagcttgggcaacatggcaaaactctatctcttaaaaaaaaatatgaaaatgaactgggcatggtggcaagcacctgtgatcccagctacccaggaggctgaagtgagaggatctcttgagcctggaaggtcaaggctgcagtgagctgtggtcctgccactgcactccagcttgcgctacagaatgagactctgtctcaaaaataaataaaataaaataatcaaacaagaccttatacaaatgtatttgcttccaattgtcagcacattttagtttcaatgcaagacgtagttattaaaagcatgcatttaggccggttagacctgagtttgaatcctgactgtactacttacaagccatctgaacaggtgagttaatttaacactcaaagattcggttatctcatctgtaaaatggagataatcataaattgtatacatcttatcaagggtgagaattagtgaaacaatgctaattaaatgcttactatgatgccaccaccaacaccatcatcatcatcatcatcaacataattttcttccttcatcgttgtactaggaagatacggatcctttttcttttataattcagccggcaaagatgctgtagttaagtgcaaatatttgttagacgcaataaattgtcaagcaataagtagtcagagatgcctatacataagctctgtctttgatttcctgtaaaaaactgagttcatgttggcccctgcaagacaggagatttgatttgaagaaatgtcaggggaaatatttgtgcatataagcaaaggctatgtaagctatgaaaaaaatcatatttagaaagggaaatgagatggcattcacttttaacaaaatgaaaacgtctttgctgtcatcttttcttgacaaatttgcctcttgaagttatttagattaaaaattaaattaaattgagtgctgtttgcaagacttaattttttaatgcaaactgattcactatgcgtgataaaagtaaaagttaaacaagtgtattttacaaagtaattttgagaatatgtattgctgaactcattcaaaactttttatgcttctgttacagaaccctccatatttcattaactagtaaaactatctgttttcccttagatgtaaacttctggaggaaaaaattcttaccttactcatctttgcattgttaatatataaagtgtctggtccataatggaggctcactttaaaaagagaagaggggattgatgtatttttgtttaaggcatatgtttgcattttctgagagcctcaaaacaaaagtggaagttaatttaagatttggtcttgagatgtttgatatgtttttttctttgtatgtaacttttgtgaaaaatacattatcagcatcagaaatagtgacacagagtagctcagcgtagggcaggttaaaacactcttatccctcttattttttctgctctatctaatgcagatactccagcttacttgttagaggaatttcttcctttatgctctatctaatgcagagatacttcagcttacttgttagaggaatttcttcctttaatgcaagagagtaaatcagtggctgttgatgaggctgtcttcttgcttgtagatgtgacactcaagttcattgccatgtgtaagccctcaagatgaaaggcactattgaacttcaacaccctgctcttttctcaggaattcataattagcatttcctttggaatagtttagatgtcacttcaagcttgtgatgtatttcaaaaaggctcaggttaaacagttcccgcccgaacacttggcggaatgaaagaaggagcatattacacaggtccatcttctttgaagagagttactaattattcaagaggggctgccagacagggctcccacatattgatgaaaacaaaatcactgccttgaaacctttccagttctctaatgttctaaacaattatgggagtttaattaaattaacttgtagctatatttgccggaactttaccacaatatcattattattgatttcattaagccaatcgctttacagagacaccatgactgtaggcaaaacatttgttatgaagtaaagctaaaacgttttgtactctgtaattctgaaaaagaaatgaatcaatcaaaatttcagaagaagttttccaactctgccttacaaccaccattaagcacaggcatttggagatataaatgggagactaagtgggcagattgaatggcttttttctatgtgcacatactttcaaattatggtgtgtactgtcattttaagtgctagctatgaaaatgggagaaatgatcactgaagcgcttcttggatttcttgggcagttaggtggtggcaggttttcataatttaaattcgcctataactctttttacttcagaaagcctttcgaatgcagaaaatcatttacacttctgaattcatcagtgaaaacagagaaagtagagtcagtctctaatgaaagttaaattaagaataatgagattaaaatttgcaagacaaactgttttctgctgtaataattcaattaaagctgcttctaattgatatgatttttccccatgttatagtttattgcagtcagtatcttaactcagaattaattactcttttcatattaaaaaactgccattttcatgaataatcgactaaaaatagaaactagtaaaatcttattgcatgtaaatctgtcctagtttaacttaaatatagatttatttatttaaaaaacagtaactcagtgaggcatggtggctcatgcctataatcccagcacttgggaagccgaggccaacggatcacctgaggtccggagtttgagaccagcctggccaacatggcgaaattctgtctctactaaaaatacaaaaaaattagtcatgtgtggtggcaggtgcctgtagtcccagctaatcaggagtctgaggcaggagaatcccttgaacctgggaggcggaggttgcagtgagccgagatcgcgcaactgaactccagcctgggtgacagagcgagactccgtctccaaaaaaaaaaaaaaaaaaaaaaaccaacaccaccaccacacacacacacacacacacacacacacacgataacataactcatttgaaagcttagaagcttagaaacttagaaattttatccttttgtgattttgcagaaataaagtagaggttttttttctaatttatagacgtttctgcttttttttttttaaataaatcatttctctcattcatctcaaggaatataacctccactgaaaataaataaacagataaataaacaattatgctcactgtgtttgttgggattacttgggttgacagaatcccaaattcaattgtcatgaacaaagaaatgtgttgtaagtactgtgggatgtcttctggaactcgaagacgggcacataagtgggtctcataagcagcccgcctttagggcatgcttactgccccctccactctgctccttgtggtgagcccactttttcttctcggcctagagtcctctcttagttcttcaatgcacagaacagcaaaaatggctgcccttactgcttgagttttacagtttgtgaaattaaataattccaatttaaagctgttggaactttaaattatttgagctttgagaaaaatgtgactatatggcctgagcacatagcatgcagctgcaattcctgcttctccgattacagattacagtatgttactcttgtgctgtggatgattaggaaaggctgaaaggtgccataaataagagtctattactcctccttataaaatgtcgaatcagtcttccttggaatgtagtaaactataactaatcaaactcctgtaacataatctaagaattggtcttgcatgaaaaatgttgcaactctgttaacatttctgtctctacctatataagtgaaaccttacctccacacttggatgcactaaccccattcttttggagtctgtgttacccaggtggtgacagcctcaaacgttgtgctcaaataaattctacacttaatcatattttctgaatctcattatttaatgctgacaagtttatatgaacccaaggagaaattccttctctaatttccatacctgaattttggggcaaaaactttgatttataacactggaggtggagttggaaggggtgctgggcagagaaactaaaggcattcgttatcaccttattcaatataaaaacccattgaacgatacatggataaagttatatagcagaaaaaagtgtaagaaaagcagtctcaaaaaaataagagtgggtggttgctgaataatgagaaagagcccaagggccaggtgcggtggctcacacctgtaatcccagcactttgggatgccgaggcgggtggatcacaaggtcaggagtttgagaccaacatggtgaaagcttggccaacatggtgaaagccggtctctactaaaaatacaaaaagtagctgggcgtagtgacgcgcgcctgtaatcccagctatcgggaggctgaggcagaagaatcgcttgaacccgggaggcagaggctgcagtgagccgagaacacaccactgcactccagccagggcgacagagcgagactccgtctcaaaaaaaaaaaaaaaaaaaagcgccaaagaaagacaaaaattgatgcagaaaagaacgttggacagacaagtcaaacaactgaatgagatttcacagctatgaaagacagaaagacggaagtagcatgaccaaataggccaagtggttaattacattgcactcttcggcatggtaagtatttgccccgaggtagaaaataccaacgatgctaaatgtatgtgaaagagtaacttaggtttccagatttcttttttgttcctaggaggtatcacttctttaactctcaaaaggagcctcgtggctaatttttattgcagtcaaagttcaaataggagagttgtcaatgtcccctgaactatttgggaaagacttcatgggaaaagtaagattaagctgatcctagagggtaggcaggatagagagctataaaggaaaggaggaggcagagcacacgaatactttaatcaattgcttcatcttcggcgtcaagatgggaatgagtaagactcctgcacagaataatgaattctgtcagaatccttctccttctgcctctccaacttgacaattttaacctttctggaaggtgtctctgtagtcattttcaaacacaattccacctttgctatcaacttagttcacatactgcctgcttgaaattctctcttatacgaactccttacctcctgatcccacttgagctcacatcagttcgctcaagtagcaaaccccagaattaacctgggaacaagtttaaatatttcatctcttgtttaaaacttccattggcctgacaaccccatgaattttctgtaagcgaaatgaccacccaaatttatccacgatatgacgcccaactgtcattctagcgttataacttgcttcccacatgctcagcaattgctcctgcctgcctcaccttctcacatacacttcctcatgccagctgcgcccttcccttttccatctgtgcctgtggaaattcagctatacttctaggatcattccaaattgtaatttcctactgacgtccgtctttatccctccccctacctctctcatcccaacagaatatgatcatattctctgttaaactacttgagatctttatttttagtttaaattttttttaccctaccttactttacatgacttacatgtaagttatttattaacataaatatcattctctttagattataaaagctttggtaatttgcattagttttgctatctgtggcatggtccatgaggaattatcaccccccattttttactttacatacttctttgctgtgtttgtatgttcaccaacaggacgtattacttttataattaatattattttctatttgaaataattaagaattctggccgggcgcagtggctcacacctgtaattccagcactttgggaggctgaggcaggtggatcgccttagttcaggaatttgagaccagcctgacgaacatggtgaaaccgtctctctactaaaaatacaaaaattagccgggcttagtgttgggtgcctgtaatcccagctactcaggaggctgaggcaggagaatcgcttgaacccaggaggcagaggttgcagtgagccgagattatgccactgcactccagtctgggcaacaagagctaaactccatctcaaaaaaataataataataataattaagaattcccactttaatagtattaaaatattaaacgttaagttctttattcaaatgtctgttgtaacacatttgagggttaaatatcgccaactgctctttacaatatactctctgtaaacattctgtataattgctattgactttcaacaactaaactagtctacctccaaattatctctttttacaaccttttaaattcagagttaatgaacgaaattgtttacattcccttttttcttagtcacatctccaataaccctggaagtccgaatcaatagtcttatcatcggccccctttcagatggagagaccacagttcctgacagatgaaaggcttctcttgggactttttttaattgacgcaggtgcttgatttcagacaagcccttctattctagcttctggaatcaacttgaaattcagcaacctctatgtgtaacaaaaatggacgaatcattcctctaaaaaataaatgaacaatgatatttagcaaacaaaatacctaaagacaaccattgatttggatgagtgaaaaaggcagagaatgcagaagatgcctgggatttagctaatctctgagattccggcaggaaggacataaaaaaagtcaaagggctcttggctgagtttgccattttattttattatttcatttttattttattttattttattttattttattattgagacagggtctcactcactctttttttttttttgagacagagtctcactctattgcccaggctggagtatgatggtgcgatcttggctcactgcagcctccacctcccaggttcaagtgattctcctgtctcagcctctcaaatagcttacaagtgcccgccatcatgcccagctaatttttgtatttttagtagagatggggtttcaccatgttatccaggctggtctcaaattcctgacctcaagtgatccacccgccccagcctcccaaagctctgggattatgggagtgagccaccgtgcttggccaagcttgccattttaaaacattcttactaaaggaaaggggtctcacaatacctccacggagtataatagatttaaaatagctttggaacataagaattactctaatgtttcaattctttgatttaaatcccagcttctctttgtagccatttatgtctttgttgtttataaattcatacaaatatttcggaagccacttaagtttcccacctccttgggtaataaattctgtatgtaaattatctgctagttgaattcatatctagttcctattatttaattcttgcctcattcaagctcaaaagaagccccaccattttacagtatgagaatttagtgactaacaccttgtttatcctattcatggtattcgtacatccataaatgttgatccacactatctcctcctccttttcgtgagcaacagacccagtcattctcatagttctgtatggagcacatccttctacaattgtctgccccgcttgatatttgtgagggaaacctggccgaggccagataccatggttcatgtaatctcagtgctttggaaagctgagggagaaggattgcttgaggccaggagtttgagaccagcctggacaacatagcaagaccccccctctctacaagtaaaaaaaaaaatgaaaagacaagtgtaaaaacaatccagtctattgatggccactgggcatcacagactcgtttccagatattctccctccaacaccttcacacaactccaggactgatggtgggaagaacagccttatgcatgcttacttccatcctaatcctacactgcaaaccaggaaataagactgaatgtgcactgtggactaaaagcatctctgttattcccataaactgactgaaaacaataaatgtacccattgttgaaaataaggctctgtcatcatgtgttcagtgacgcagagcctagaacatttcagagtatcatgtaggtgattcttctctcaattctttcaaggctggtacaggactagtggcattccaaacacataggagagaagtttatttattacacacaatagatgcctcaggtcattcgagcttaatattcttatgaaacctgggcaggacctgtcagagtatgaaatgctccatctgaagccacaagagaaagcactactctgcttccactgagatgaaacatgaggactttggattaagtgtaggcagaagggctaaaaatatatatttttaatgatgtgatatcaagaaatgttacttaagtaatttatttttatggtaacatacttataaaatgcagcccagagatgtctctgggatggtcttagtagagttcttccaagagtaattaaagggatgacctcacagccatcaccaccgtatatatgatagtgctttgcctgggtccatccagctggcttagtccatgaaacaataccatgtttctaactaccattttcaaaatgaaattaaaaagggattataacctgaaggtagggcaaaagcactttaaaaggacaaaagcatcctcatgccaatgaagaagatttatttcaggtgtacacactaaaactaaatataagtatggtgatttatttgtcttaggtgtttcatggttttcaaagttttaaagtggtttctgcagctgctgaatctgacctttttctctgtgtaacactcttggtttacttattttgtacaacgatttttaaatttccagttcctagaattcttttaagatcaatgagtaaactgtagaagggcaaaaggaaaagatttctactttaattgtacccttgctagtgttgccgattcaaggcactacaacgttaagatggattttatttttcagaagtatttgaacagtgatgtcgatctttctaacccaccgaacaattagttttaaagcagagaaaattcaatgtgacttttctgacttgccttttatatggggatttggaaaaaacacctccttctggctagtccatctatgaaagaaggttctgcacaggacctagtttcaactactccttcattccacactgttctcaagagagaaattaggatgaatggtggacgaattcatacaaaatcccaaggcaaagtaggtccaagccttggcacacaaacatataacttctagtccaataactggctcttttatatccaccacaattttgttttccccacgagtgccaagaaaatcagaatgtctagttgccttcttcctgacaacgattctcaatgatcctatgaagaaatgaataaaaaataaaaaggtacctcacttattactagatatctgtgactattatcttatggctagaacacgaacatcagaaggtcatggcagtgatgttgaattatttaaaactatttccccatttggtaattgttaaagtcatagagacacctaggtagtttgaaatgccctccattgaaagccagcaatttctatgtgtctccaccagccaagaggaccctgtagagctttactttctatagctggaataatgaaaaacaataggttttttattgttttaaagaaaaaattaaaatactgactatatttttaaaactgcacctgctcccttaacgttttgatactcgcatggataaacaactttgataacctctggtgtaaagaacgtggcctttgttgcttagcagagccatgtgcaaatctcaggtccgtcatttgatgaatgatgttaggaaaataatttagcctctctgggctaggtctttgtactccttccctataaaatgagaatgctacttccttgataaaacatgtactttacagcataagttccccttccttctttctgtgcaaactctgagatgacgctatttctaagagtgcaacacttggaaatgaggtgtcttcttttctctggagctattaagactttctttattccctacttatgacacactctgtattacattatagtcatatgtgtacatgtcttatttcttttgttctcttttactgaaagtttcttcaggataaatattagtttaattacactggtttaatcactgtatcctgaatagtatcttttgggaaactgagtatacagagacaatggctagaccacatatgagcacagaattctgacccacagcccctgcaaccagcctgggaagccaaaccacaagctcagcagtagtaagtccaaaatggtcaagactcaggcaatgacaaccagcttccctaatttttgcctctgcctataactctggacaaaccagagaaagctagacactcctcaatctagttatattagatacccactttcagcttccccatgcaacaacctccagtcagagctcgctctttctctctctctctctttctctctctttttattataaagctttcccactcctctgcctgcctttgagtctttgccagacacaagtggtggtggacgattaccttgctacagcaagtgctgaatacatagcctttctttgttttcattttggtgaccttcatttacttccacattaaaaaaaaaattcatgtacatctcactgcattcccaagaagaatctggggtaaatccttgtccagaattatgtcttttatagaagcaaagtctccttccagttctaatattctgtgactaatagatgttgaggtcgaataaaatgctgatttgttgaacaacttttcagaaatagattattcctgtgtataagaattgtcaaaataagtaattcaaaatctaaactgttgaaactttcccttattttgagccctaaaagaatatgattatggggcctgagtcatgtgacaggcagctgtaacctaggcagctgtaacctttgtttttgtgattatagattagccttcttcctatattgttttgtaaaatgttgcaaatgactgaagggcaccagggaagaccctttccctctacgctgctgatcttcattacagattgactttcttctttcctttctcacacaaggactttacttgactatcacattgtctaagatggaatgccaaacatacttttaaattggaaaggaaatgaaaacaagctttacagaaaagaaaacaaactgtaaccaatcattacattgctgtaacccataaaccagccttgtatagaaaatgctgtaatcctgttaaatttgttttctgcttacataagcaagaccttaactttttacttctgagcactgaccccatttctctggagtctattttctgatggccattcccacctttgcactggaataaactctttaaaactagatctgatccttgcagttatttcaggttgacagaatggttcatgctgaacctccgaattaagttgttggtttaaatttttatgcaagttctaaaagaccaaattaacctcccaccacatcatacccagcaatattatactgcccagttaagagccatgggtataaaattacatgatttctttcaggaggcatttatccttctactaaatatcagttcattttttcaaaaatccactcgtccagctttgtgggaactgaacactaagaattctcaataggggaagaaacaattgtctcccccattgtatgtgtattgatttgtaacataacgtggggcgaatggtttgagcctggcttctccttctcttcttgccaaccctggtcccttgttttgggatccgtttcccttggagaatataaacattctttatcccacttcttgaaaggccatccttgtctttctagttgatgttaggaatgaactgacatggacgacaatgactatgacctatgtaggaaatctgtgaactgagtaagtagtcatatgaaaccaaatcttatgtgacctattgatatggtttagatttgtgtccccactcaaatctcatgtcgaactggaggaggggcctggtgggaggtgattggatcatgggaagggatttcccccttgctgttcttatgttaatgagtgagttgtcgcaatatctcatggattaaaagtgtgtggcacttcctccaacactctcgctctctcttgccaccacgtgtgcttcctctttgccttctgccatgactgtaactttcctgaggcctcccagtcatacttcctgttaagcctgtggaactgtgagtcaactaaatctcttttcttcataaattacccagtcgcaggtagttctttatagcagtatgagaatggactaatacacctatatttacactactctaaaacttgcattatacatgtaattttagaaatttttattgtggaaaatcttaaacagatacaaaaataaatagaatacagtgagccacaggtactcatcacccacctgtaaaaatcttcagtttattatgccaatttatgttttaaaaggaataccaactctctctatgaaaagtatgacttaggaaaaggtaccgtatataggtttttctattagtgtgaatttcccatgcataaagtggttgctctctcctagcaggctctggctgctggcttcccggcctcccttaatgctgtggatacctgtgacacaagacctggctttccttaatgcctatctaacttctttatttcctataagactccaaacttatgaaaaaaagagggtgacagacaacagttcatatactaataaagtaaaatttgacctctatttttatatacattctgtaaattttttttagttgacatataataattgtacatagtcatggggtacatagtgatgtttcaatacatgtaatgtatagtgatcagggtaattagcatatccatcatctaaaacatttgtcagtttttttgtgttggaaatgttcagtatcctccttccagctatttgaaattatatgatatatgttattgttaactatagtcatctgacagtggtatagaacactgtaacttatttcttctaatacacattatttaatttactcctaaccaccatgtaatatagataatgcaatcatgttaatcattcctttttagagataagagagctagggttctgagaattaaaccgatagatgtaaggttacacagttggtaagaagggggccctctacgaggtagtatatgggggcacatttgcaaagcattacaatggaagattatatttcaaaaaaaacacggcaaaaatgcatgtcagctttcttttcaaataaaatataaatgtccttgaacacagtccactctcaggggaaatttgaggaaaagacatatcatactgactatattccatttgattgcacacagtgatacaatcctttacatttcaaccaagacattgaaatgctcctacttcaagttctgattgttcacatgcattctctgggaactgctgcctggatgtacaggattttttaaactatgcagaacctacatcattcattctatatggcagttgttgaaataaacgtttagtgattctaaatacctcactaaagtagctagtacttattgtgaatctaccatgtagaagtgctgaatgcctgttgtggattgtggatggtgacaggaaaggaggtaagaaatgacttcctctgggagggatctttgatttgtgctttgaacactgagtgcaaatcagataaactgagtggagggacttaagcagaactgcagcaatgagaaaactcctggttaatttgacaggaaaagattgtttgcagagcggtatctgtgggataaagtggaagagtgtaatgtacaggcttgagtggaaatagaacatggataacaaagaagaaacaaccctaggaaaaagtaaagctgcaatatatttcttatcggattaatctaagatcagtgtggagaagccaacagagacataaaggacctcgtgtaagaaatcagacaatggcactggggacaatagccggtaatgcagagaatcaagcaagataagcatgaagtcagaatccaggcataggctggactaacacaatccttacctgcaaaatctgtaaaacttttgatagcaatctgcactaaaataaacatttttcatcatgacccagcacatacatgtgtattccaacatacatagatttaattgaaacaaaagttttacaaaacaatagctattctttctatggtagtgaagcctactatttttattctattccactgaataaaaattaaaatagattttacaaccttcttaaatgtttttacaacccacaactggaacatgattcaaccagcagttcataagagactattgggtacattccatgaggaaataaacatacgcaagaagtttccatccttaaacaagtttccacccaattaaacaattaaacaaaccaaccaatcacagtcctcctctggcaaccatcttatctcattttatttaatgccaaacctcttgccttccgcaaagagctgtctaacctcatagttttaaaactttttcgtctcaggacaactttacacttttaaaaattattgagaatcccaaagagattttttttaaaaaatcaaataggctgtacctattaatatttaccaattttgactaaaaacaaaactatcatttgaccctgcaatcctactactgggtatttacccaaggaaatcattttataatataaaaaagacacttgcactcataggttcatcacagcactatttacaatagcaaagtcatggaactaacttaaatgttcatcaacagttgacagaataaagaaaacatggtatataaacaccatggaatactacacagtcttaaaaaagaatgaaattatgtccttcccagcaacatggaggagagggggccattatcctaagtgaactaacttagaaacagaaaaccaaataccttttgttctcacttataagtgagagcacaacaatgggtacacatagacataaagatgaaaatataatagatactgaggactccaaaaggaggcaaggaggctgagggttgaaaaattaccagttgaatacaataatcactctttgagccacgggtatactagaagcctactttcatcagtatgcaatatacccatttaacaaacatgcacatgctcccctgctcacccaaaatgtaaaataaaataaaacaaaacaattaaaaattaaaaatttaccagctatgaaataaaaaattaaaataatcagtaaaaatatatattaattacttcattaaaatgataataataagtacattacatggtaacatgaatatctatcacaactaactatatttctcaaaacatatttggtaagaggaatgacgttattttacagttttgcaagtctcttccatgtttggcttggaagacagctggattttcacatctatttctgcattcaatcagttgcaatatgttgttttagttgaagaaaatccatccttgcacagaaaatgctttgaataggaagggatttttagtagccttatcaaacaatgaatgatactcttctctgctactataccaaaactccacaggtagtagtcagtgattacctgagatgtagaatctgaaacttttaacaatgaacttttcatactcctactgtactaaaattcattctcctattttggactttgaatggatctttttacccaggaatggcatgtactgatgacttggaaaatactgatgcactgagttatgcagatctcttaaatgctgacacaattcatcatacaatatccaaaatgacatttgttaatatcaccactgatacaatgagaaaagccttttactattggaaagctcccaggctcatcgtgacaatcacaagttttccaaaattataactttcactcacaagtttgttattggcaactaatactgtcagttgttttccttgaaatgacggtcttatttttttccattaaaaaaaggtgtgccaaatattcatgtctgaaacagcagagcttgtctttcagttattctttcaagtaacaatgactagctcagtttgcaactcaaataatagcacatcacacttttgtatgcagcgccttgatctcttcaaagccatcttccacactgtggtccgagtggcgtgttgtaagtaaatctcctcatttttctctcttattgaaaatacattggttttctcttttgactttaggataaagctcaaagtacttggcatattatgaggccctgcccatcctcaatgcaatccccatccttcccacactggagtttttaatcattttcccaggtgagccatcctcaggcctctaaggcattgcctgcctacctggttaaaatgggcttaccttccaagattctgctcaagttcaggggctttgagaagccttttctcatacaccttgctctctacataccactatcatcataggtctacttatcaattaatgttgtatttgtaattttttttgttttgttttagagacagggtcttgctctgttgcccaggctggagtgcagtggcactatcacagttcactaccgcctggaactccagggttcaagcaatcttcacgcctcagcctctcaagtagctgggactacagatctgcaccaccacgcctggctaatttttatctgttgtagagatggagtcttgctatgttgcccaagctggtctcgaactcctggactcaggtggtccacctgtctcatcttcccaaagtgtgggaattacaggcatgagccaccgcgcctggcctaaactgtgaaattcttacagggggaaattttgtactgtacagagatctttttaccagtacacatatgtgtccaaaatgatctcaggcctagaaaagccacggcctctagatagagaggaaaatagggaaactagctgacaagtaaagggtcactcctgatagcacagcagcaggctatggagtttggtgtccacagtttaagaaatggaggatagagggtttagagtggaggtgcacgagtgaggtgcattttaaataggttaagtaagcctgcttcacactacaatttgaactttggagaaagactcaaggcgaggacaccgtacctatatttagaccccagaagaaagctttgctccaggtctaacaggttatctctccatgagatagcctccacttctctctggattatgatctcacttactccttactccattactccccttgcctgggctcctgactctgaagattgcttcacagatttcaacagtaaatagatgatatcaggaaaaagaattcagaggccaaattgtaaaatattgggtgaaaaaaagtactggacagatgtcaaaaacctttcagagattttacttttctaacttgctccaaatatctctaaaaaggaattatggtttgcagtgcttccaaaagagcatagctgcagaaccttgttttgcaggagaatttcaagggctaaggtttagtgcaatacacctgggagagaccttgaggtatgtatgcatctaggttgagcgatgaaaggacaacaaaaggaaaagaaacaaaaacaaagtctctaaagagcagcaacaataaaatcatcacttgaaaacttgtttgaatatgtatgttataattgatgcagcctcacataaaaggtgacaagctatggttccaggataatatgtctgggagtgagggtggatgacagagagggttgtttggaagcttataggagaatatactgctctaaatttcttatcatgataaacttggaactttgaagtttagagaagaaagagtttatatatatgctagtctatccacctgtgttgcaattgttctttttttttttttttttttttttttgagacagggtttcactctggtacccagtctagagtacagtggcaagaccatggcttactgcagcctcaacctcctagctcaagcagattctcctccctagtagctgggacctcaggtgcgtgataccacacctggctaacttttaaattttttgtagagatgaggtctttgctgtgcaggctggtttcaaattcccgagcttacgcatttctcccgtcttagcctcccaaaatgctgggattacaggcatgagccactgtgcccaggcttaattctttttctgaaggtaattattaagttcttttccaagactgctttattacttttttgaaaaatcacttatacattgcttttgttatgcaaatgcagctgctatcttcagtgacattgttcagtaagttcacgcaaaagtaattcaacccttggcacttcattcatcctgttggcaagctgaaggagtagagagtgaaaaattaaatgaatatgtgatctgtagttagtacctataccttctatttagcattctcgttactctccccaatctggatgcctagtgtgtaccacagataccacagggttatgtcctgataaactcatcataagttgaaaatattgtaagtaaaaatgcatttaatacacctaactgtctgggcatggtgtctgatgcctgtaatcccagaactttgggatgctcaagctggtggatcacctgagatcaggggtttgagaccagcttgactaacatggtgaaaccccatctctactaaatataaaaaattagccaggcacggtggtgcatgcctgtaaccctagctacttgggaggctgacgcaggagaatcacttgaaccccgagaggcagagattgcagtgagctgagatcgcgccattgcactccagcctggccagcaagagagaaactccatcacaaaaagaaaaaaaaaaaaaaaacacctaacctaccgaacatcatagcttagtctagtcttaccttaactgtgctcagagcacttacattggcctacagtttgacaaaagaatctaagacaaagcctattttataataaagtgttgaatgtcccacttgatttgttgactcctatgctgaaagtgaaaaacacagtgatcatatgggtagtcaaaatacggtttctactgaatgtgtatctctttcacaccacggtatagttgaaaaatcctaagtcgaaccacattaagttggggaccatctgtaaacataggtgcttgataagtgattgtcagacacatgaataaatgagggaaatttcctgctcttgtgcaatcacagagacctctggaattcaacatagctactctcacaagtgctcaggaaccctagaggacatcaacaggggtggtgtcaatcagggctttttgatgacttgccccagagcctgccctgctgcagaccccaggtccttagcctcagcaacacccttggctctgaggacttcagtgtggctggaccagcagctccctctttttcatcactcattcattatttaatcagcctatctacctcaccaaggcctccccaacccagctgctcctttctgtccataaaataactgccttagttcaggcagttatggctgggtgaagcagagacaatgccactattcccaccattctaattatgacccacatcctggcaagtggattctccctaagatacaatcactcaaaggctcaggggcaagaaaagagaacatgggccggacacggtggctcacgcctgtaatcccagcactttgggatgccaaggcgggtggatcacctgaggtcgggagtttgagaccagcctgaccaacatggagaaaccccgtctctactaaaaatacaaaaattagccagctgtggtggcacatgcctgtaatcacagctactcgggaggctgaaggaggagaatcacttgaacccgggaggcggaggtggtggtgagctgagattgcaccattgcactccagcctgagcaacgagagtgaaactccatttcaaaaaaagaaaagaaaagagaacatggctttaggttttggtatcaaataagcccagaataatgctcaacccagaatgatgcagacctatgtcctagtcatggtagcatgggactgggtatccccgccatgctgtccaccctcaccttagaagagggcctgcccctggagaagcaggagaatgtgttccctttggcgaaagtttgaccaaaagaggaagaaaaatgaaccaaacatactcagatatttttctgaaagttactgatgaaatgaatcactccaatttcttaggtcaagcattaataaaggggtggggaaaagccagggatgtgcttagagagtatccctcttaagaagaaccaggatgggcatggtagctcaagcctctaattccagctctttgggaggccgaggcgggaggactgcttgagaccaggagttcaagatcagcctgggcaacattagtgagacctcgtctctagaaaaaaaaaaaaaattagccagacatagtgctgcacgcctatagtcccagctacctgggaggctaaagtgggaggatcgcttgagcccaggaggttgaggctgcagtgaactccattgcaccactgcactccagcctgggtgacagagagagaccctgtctctttgaaaaaaataaaaaagaaagaaaacaagaaccagaaaatgcatttttgttttcttctatcaagctttataaaagcattggtcaacagatggaagagtggttttgaggatagccctattccctcttaaggctgggatagagggttagggatggcattcaaaggaaaacgtctacctttagtacaaggcggttctattaaaactgtggaggcattagatggaagccagcagtaatgctttagaaccattctgggcttcctgcagagtggtgtctgctgggacctgaatcgtggcaggagatgcccagtgcacggggcccatttggtcaccagcagaaacaggaagggccccctgggagctgagccaattgtgtggacatgtgagacatatctcgggacctcccaggagagctatggaagtagtgataggacactgtaggcgctgcaggtaggcagaggcaaaagccagcgaacttgttactcatcaatggattctctctgtactaactgctgaggcctgaagaaacttggttatatacagaagtgtgaggcctcccttggagactaaagcatttgctccctcccaagacattaggcagaaaatactacttgggatggcaggttgttttgcacggtcatgcccttttacttcatgagctataatctagatgtcagctggggactctgtgtcctcatggtatatgtaggattgctttgaccctcccattggacagtgtgaagaagtcttaagccaactggagatttgtggtcattcttttcatggcttagctctatccacacaggcggtcattttctgggcctgcaccatgcagagtccaaactcagttcttccaccagtctccataacaatgctactcgctctaagcattttatgaggtttcctagaattcatgtaatatttaaggggataacaatgagagggctatatctcactgcacagtattccaatttctctaggtctttgaccctttttcctccaatcatctagatacccgacatgcacaaagacatggacacacacacacacacacacacacacacgctgaattcatcctccctttgatccacagaaaaccaagggttcctcctctgctctcccacagaacagcatccctcccactcagctttcagcttctatcctaaatatgctctgcaaggaatttgcccaacaaaggcacttctctagttagaaaaaaattatcatgccagttgctaaaacaaaaaaaacactctctttttctaaactaatttagatgcatagtaggtgcttagaaaataataagtgtgtaaatatttattactctaagtaaggtcctcttcagggtgaccctgtacagaagcagcctggggctgagatactccctatctaatttataaaggatcagggcaggcatacattaaatccttttttctacctcgatcttatttcctcttaggaactgaaagtgctttcagacattatttcagtaatccttgcagcttcccccaatgagaggaaaaaatgcccttatctccagtgcgcagatggagcccagagagatggaagttaagtgactcccaaggttgcccacagggagcacagagaagaagctaagctgcgacctggagtcttggtgaccccgttctagagttagaagataacgttgccttacaaagagttttcaaatgtggcagcttttgctctttgaaatgggaataattgaggtttcccatttatatttatttatttatttattattattattattattttgaggcagagtttcgctcttgttgccaggctggagtgcagtggtgcaatctcggctcaatgcaacctccgcctcccgggttcaaggaattctcctgcctcagcctcctgagtagctgggattacaggcatgcgcaaccacacccggctaattttgtatttttagtagagatggggtttctccatgttggttaggctggtctcgaactcccgacctcaggtgatccgcccgccttggcctcccaaagtgctgggattacaggtacaagccacagtgcctggccccatttatattttttgctctgtaatggggcatgggagttcatgcaacgggctctagatcaagcctgcttgggtcaaatgcgcagctctgctactctctagttactgaccttgggaaagttactcagcattttgttgcctcagcttcagcatctgaaaaacagatgtgctaaatacaacaatatccttctcacggagttattatgaggatcaaatgagtttacccctcctacctccagccccccatacacccactagagaggttaggaaagtgcccggtacagagaaatgctacataaatgttagctataattatttctccttttcgaattgtgcattctttatttagcaaccttaagttgattttttttttttttggtctaggtgacagcattgcctaactatagaaaccaaccttgtagagtcctaggcatataattaaacctaatatatcaccatactattgttcacttctttctttccttccttccttcattccagaaacactttccaagtgcccactatgtgaaaggtacggtattagattaggtacagtagtaaaggtaatttagaagataaatttggccttagcatcttatggtctaaggagaatatgcacataaacatttaaatttcaactcaatgtcaaggtaatatcatagagagaatccagaagaagcaacatctaattctgcttgatactatcaggaaagccttacctgaggaggtaactgagtcttgaagtagaaataggagttattctgacaaataaaaaatccttgaaatgtttgggcaatttgttcagaatacatattttttaagctcacatacaacaatataaaaagtaaccatatattagtgataaagcacgtctcaacacattttaaggattgaagtcatacagaaagcacaattctatgaagctaagaataaattactaaatccgtcaataatccctactcgacagccatcattctcagcaaactatcgcaaggacaaaaaaccaaacaccgcatgttctcactcataggtgggaatcgaacaatgagaacacatggacacaggaaggggaacatcacacaccggggactgttgtggcgtggggggagcggggagggatagcgttaggagatatacctaatgctaaatgacgagttaatgggtgcagcacaccaacatggcacatgtatacatatgtaacaaacctgcacgttgtgcacatgtaccctaaaacttaaagtataataataataaaatttaaaaaaagaataactttccattttatcaattgaaattaatagaagtaaaagtttaaatagtgttgactacaaatattagtatatagatgtatgtatttgatgtaaaaacatagttttggagattattctcttcaaatgatttagtatatttcagaaagataagaggatgataaatttcaaccaaaaataataacactgagcttttaaaagtatacttgaaaaaaaagtacagttgcatagatttgaagaggaaatatagagcagtatgttatctaaaaagttcagaaaatgggtcgggtgtggtggctcacgcctgtaattccagcactttgggaggctgaggtgggtggatcacgaggtcaggagaccgagaccatcctgactaacatggtgaaaccccgtctccattaaaaatacaaaaaattagccgggcgtgtggcgggcgcctttagtcccagctactagggaggctgaggcaggagaatgacgtgaaccgggaaagtggaggttgcagtgagccgagattgcgccactgcactccagcctgggccacagagcaagactccgtctcaaaaaaaaaaaaaagttcaaaaaatggccaggtgcggtggctcacgcttgtaatcccagcactttgggaggccaaggcaggcagatcacttgacatcaggagtttgcgaccagcctggccaacatggtaaaaccctgtctctactaaaaatacaaaaatttacctggcatggtggcggtgcaagcatgtagtcctagctaccagggaggctgaggctcgagaaacgcttgaacccggggcggaggttacagtgagccgagattgtgccactgcactccagcctgggtaaaagaacgagactccgtctcaaaataaataaataaatttaaaaagttcagaaaatattttataatgtcaaaaatataaattacacagtatatgtatatatgtaaatatatacaaataatttacatctctataaaatatttcaaaattattttataaagcaacttcccagaaattgagtatttaaatgctatttggacatgcagaataataggcaaaaaaaaaaaaaaaaaaaaaactcttcagaggaataagtagggaatttcatacaaaggggtgataactcttaagatattttagctttggattaatttacatttccctaccccgtaatgatatgctcccttggggctagaaagaaagcaaattaaataccagttgaacaactaaattgattattatattgatatcccttcttcaaaatgttaacggaaggacaactactatttatacacaattagcatggaggagagacgtaattaaacataactttagataatttctccaaattatactcctctaacattttgaaaaagtttttaaaacagaagtgatataaaaacaggtgagcttcttaccctcagcctccatgctataagtaacactgaaattcaccataagattttcttgcaaaatgccataaatgaccttgcgtgtttaagtgtaccactgaggggatattggctactagaaacaaacaaacaaacaaaaaaaaaacggaactcaaaacacttcaagcagtaaaaggttttttgtttgtttttaaatttcacaaaatgaagtaaagtcccgaggcaggatgatttcagatttggttaagtcagattctttccgtattctgactctacattcatcagcatgggaccttcccagccacgacattatcacatttttacatgcctgtgcccaaaggcaaaaatagcgtcaacctcttacttttccttcctctaactagcaaaaaagcatcgccagcaccctcacagaagaaatctctttaggtcacaacagctagaattgcattaagtatattttataagccaataatcaccggcagagagaataaaacagacataatcaaccccctaaagagcagcagttctcaaacttgagtgagcaccacagttacttggagagtttattaaacgagatttctgggtggagcccagaaatcagtaggtatagggtggggcccacgagtctgtatttccaaaaaacttccaggtgttactgatgctgctggtccttctacaaaccccctgcactgccctaaagcacgtgggagcatcttagcaaaggggtgggggaggtggctcaggtaatcaaccaaagtgcatctgagatctaatattattttaaaattgcttttcaagaattcctattacttcaaattaaagatgtaactgagtgtcttctgagtattttagaattgcaaattttgatattctaccatcactatgctccacctctctgaagccattactagggcaaggatatagtgagaaagtttctgtcactgctaagcaagtgcatccttcagattgccaatgtgtcattgtagttggagctattaaacttctatgtggcatgaaaattgtttggctaactttaaaaaggagaaaaaaatggaagtggaggttagaatttttctagcccagcaagaacccacttggtaaccacttttagataaaaagcccaaaaataatatacttcaccagatgttcctttaattttccagggattaatttgagagtcaattacctattttaagtgattaacataaattaaaaaaaaaaaacactaggctctgaaccaatgcttttaactgtatgatggaccattgttcatttccgatacttttaagaactaggatgattttgacacattaaaaaatgtcctggaatgaatttgctattctgcttggcaacatttgaggaagtaaatactgctacaaatcctttaggtagctttcaattgtccatgtctgttagtgagaagagggacagtaagaaaaatgctaaggtcaaattcactcatgacttcatgccaaaaaaaaggtatttctgagttgataactctaaaatctttttctaagtagggacaagaattactaataacaaacagtggaaaacatactgaactaaaacacaaaatatctgaattttacaggtcatttaacttccctgagcattgctttcttatctgaacctctaaggattggatttggtgtttggtttcttttttatttttataacatccctttcagatataatccaaaggtgacatctcctttctctgtcctatccatctttgatgatatgtgttaataacagttaaatgcaaaataataggataaaaggcttaattacaaaaaaaaaaaaaaaaaaccaagaggccagataattctactctggaagaactggctgtaacatcatgatgatggcagcaatttagaaagccacattaactttgttacagagatttatttaacgccagtttgaagaatgacgtctttatgccgatgacatgattcatttttttttaatgagtaaaatgtgtttttctccattagactttactctctgtaccttgaaaataaaaatacctttccagtgtcatgcatgagtcatattgattctcaaattaaactaaacacccatagcacataggaaaaaaaagccaaatgacaatttagaaatgtaagggaatttgaatgtctactcatttacttgaatctaatcattaagatgaggatgttatttcactctttctagaacaatagttttccaacttgagtttgcatcagaatcaccaacaggaccagtaaaaacagacagctggacccaacttccagagttgccaagtcagtgggactatgtagggcctgaaaatttgcatttttaacaatttctcaggctacactggctgatgttgctggttgggaaccacactttgagaactactgtttgtagaagactggtaaaaattggtaggtgtaagaaagatattctttttagatatatgtctgggagctgggggcaaagtagaaaagcatttaaaaagcaaaaatgagagacacctgaactgtcatgcatttaccagaattttctctcataacgtggcagccttcactgtcctctttcctttttactattctaaatcaaaacattacaaatgtacaagctggaactgattatgcataatagctgatgttacttcactgattaaaaacaaaaaagcaataaactttggctccctctgcaagctgcccataataaaatgcagaggaaatatttattaatcaagcaaagactgaaagacatttcgttaatggtctgcctcatcacatcagtttgaatcacattacacatcccgttaagaagagatgatgcttaaaaatacagaaaactaaatgtggcattatcatccatcccaactggaaaatgtgatggattgtccttaatagaaagagtggtagtctattcatgtggtatgtctcgcaaaggaccgccaggctccaagagccaagtattctgatcactttttccttaatgagaggctcccataaacacaatttaatcctctttgaaaacctgagggctattttgtgtttaagtggcatacacagagatcattaaaatgtaaaagaactgtgcagggaggcccaatttttttccaggtggccatgcatcagaattttgttagaatgtaacatggatttgattgaatgattctcccatttccacatggagagtggagcccagagaattgtttaatcatgtatccatgattcaatattcatttatggagcacctatgctgggccagaggtactatgagtggggatgacaggatggatgtgacagacaggacccctgtccccatgcagtttacaggctatatcagtaattaacaagaactaaaatacttggcaaagaggaatgcttccatcaatgtttgtttaaattaaaggaaaaaaacaaaccccacaacgaaataatcaatacagttgtcacaagtgcacaggacagcatgaaagcccatgacacatattttggagaagaggtacttccattttttttggtgggggaggtacattagcctcaaatttcacagaatacatgcaatctcaaagttaaaaaatgggttttactgttaaggtctgtcaataattcaacttattatttgtttgtttgtttgtttgtttgtttgtttgtttgttttagacggagtctagctctgtcgcccaggctggagtgcagtggcacaatctcggctcactgcaagctctgcctcctgggttcacgccattctcctgcctcagcctcccaagtagctgggattacaggtgcccaccaccaagcccggctaattttttgtatttttagtagagatggggtttcaccgtgttagccaggatggtctcgatctcctgacctcgtaatccgcctgcctcagcctcccaaagtgctgggattacgggcctgagccactgcgcccggcaattcaacttattaatactagaatacattttctacagaaaaagttgtgaaaaattgtgatataattgtattgtagtacattgtaaaaattacaatacaagtgaaatgctttttatttacatttataaagaatagaaaatgtaatcataagaaataagagaaaaaccatttttacataaaattgaatataaacagcaataaatgaaatcgactatatatcaatttgataaaccacagagaaaaaaataattatttcaaataatttttgaaaatagttctttgacccattttaatgggatgtataagtctaagggcaaaaaaaaaagaaaaggtctgaaagcataccttaaatttattaatgggtttgttagtagtgatattctaattttgagacaatattgtagaaaactaaagagataggttgataatattagccaccataattttttttctaagggaaaggagatacaaatataaaaaaaaagaaaccaagaaaaagaacactcataatattaattttctcccacttaatttttctgtaatactaaatttgaattgaaaaatatagtgtgaaccaaagattataaacgtaatttcccttagggtttctactgaaagggtttagaaacattgacacagtagcaacaagcaaatttagttccctgatcctggtttctaaataccattccttacagaaacaacaaacaaacaaaaaacaaaccagttaataccaagtttaggtttggtcaaggtgaactggtgacaatttgttgtgccaaacactaatttaaatcaaactatgtgaaagaattcaaaaactagcttcaaaaagcattcatgagttcacaataagaaacagggagagagagaggcagagggagagaaagagagagagaaagggagacagagaatgaatgagatgccctccagcaaaggaaagcagtaagtccacgacatcatctatccttgccaaaatgtctatcctggatctaataaagcatcccatcctgcactgcccaatatggtagccattagccacatgtgactgtttagatttaaatttagaataatttaagttaaacaagttagaatttcttttcctctatcatcctagccctctcacatatggctggtggctactgtattgggtagcaccaacgaagaacagccatcctcacagcaagatctgtcgggcagtgctgctccagacctatcttccaaattatatggaaaccaagaaaccaagttaaatgacactacggggaaaccatatgacaaatccagactgacagaatgccgtgggacttctactagactattagcctgaactcttccaaaagtaaattgtgtttgtgtgtgtgtggtgtttgaacacctacatatgtatataaaatgcaattattattgtatactacaaagatgtaagagaggtaacaaccaaatgtaatgcgtgaatctggactgaatactgaattagaaggaaatctggagaaatctgagaatagaatggatattagatgactatccccacacctacgccatagaagcggaagtcactcttgttgtttataaaaggcccacgagggaaagtgccctactttttcccagagaggggaggggcttgcgggaaatgaatgggagagagttgaagcagagtgctgagaagagggaaagatttaccataactggaaaggaaaaggagttttactagttcctcactgaaagattgtccccggggcctgaaagcttgaagagatgagaaactcctcccctttcaggcccagtcccaaggcgcaaggccacttacagtaatcagcagcgtgggtcagcaagacagcggaagcaggacgacagccggccggaagacacctaccccggccggaagacacctaccctggccggaagacacctacctctgaagatggagaaggaggccgtccgggtactacgtagcagtcaggtcagtctgggacatttcctgtttacagaggactataaaacccctgtcctgtcctcatttggggctgacgccattttaggcatcagaccgcctgtgcccaggcgctcattaaaacagcatgttgcggccgggcgcggtggctcatgcctgtaatcccagcactttgggaagccaagacgggcagatcacgaggtcaggagatggagaccatcctggctaacacggtgaaaccctgtctctactaaaaatataaaataattagccggatgtagtggcgggcacctgtagtcccagctactcgggaggctgaggcaggagaatggcgtgaacccgggaggcggagcttgcagtgagccgagatcgcgcccctgcactccagcctgggcgacagagcgagactccgtctgaacaacaacaacaaaaaacaaaaaaagcagcatgttgctccacacggcctcgtgttgtctgttggcgtgctcttgggttcgagctgagaaccttacactcaccacttccgggatgcctcccctatctttttgcaactcttttttgagggaataatggcactgggtttacctagggagaaaggatactaaactctggggctcccaggtttggcaggctcttgtggaaaaaaacctgcccttgaaaaacccctaaccaaagagctttgaacaagatgatctgagtgggaactccttctcccacgtggtgtggccggcctcgtgtctattaaactctctactacaatgtcagtggcctttttttattatttttttttgagacagagttgcccaggctagagtgcaatggcgggatctcagctcaccacaacctccgcctcccgggttcaagcaattgtcctgcctcagccacctgaccagtagcctttctttatgcagtgacaggacgaatcccttgggtggttacatgataatgacaaaaaaaaaaaaaaaactagtttgttattctaagaaagacatatttgaaaaatgagaaaatttgttgactgtggacaataaaagacagtgttacaaacaatatatgagtctttttaagaggaaataaaatgtatcaaatcagatctatcgtccaccacatccctccttcactagccggtaggtgaagctctttcaagtgggtgagggtagatggtggaggaaagataagttttgttcaattaaaaaacatgtatagacagtctgcagtgtcagacactgtgctaagctcctcattacttcaggagcttgataaaaatactgatttcaaggcccagctcccagagattctgactgagtctttttctaaggtggggtccaggaatcctcatctttgaacattggtcttcaccctttccacaaggaatcacagtggagactttcattggatggcaccttgtgaaaacctgccctagtgttttggagataaggggggggatgttcatggggtagaggggagtgtcactctggagcactctcctgccttgtgtggccacagcacagtcccacagtgaggggccacgtggcactgcgcaccgatcttgagctatagtcacaaagctcctaggcaccacccacgaaaggccgggtgatggcagaacaaaaccatctggaaacctgaagatggctatcttctcttttgcagagaacaaagaagattacgtgttttgttcctaccttgatttcattttcagttcttttggacactgccttagttcagctcaagtgcatttgtgatttcacatgtaaaaaaaattacaaatgagcatcatattattcttgcttagtgttcacaatgctttggcgtccaggctatgttccccttcctttgcattaaaaaatgtgtaattttcatatgttagagctagaagggcaccaaagaagccatgaagatgagctttctgttaatctgttggtggcttgcatcatcattggatgatgcctactgaagcaaacgcaaaattctattataaagctaattcttaaacaatgtgcattacattcagctgctgtggccaccttagctgaggaagacatttctaagggatgtatggtccctgagggctctgtttaggcatcatatcatcaggaagtttatccttattcattcctactccttcctctctcccctcaactctgggatctatgttgttcaatgttgtactatcaaagaccgtattttattggcatttttttttccttttctttctctcctgctgtgagctccttgagggaaatttatgtttcccaggtctttgcatttctaaggctacaatcagaaagtgacacaaagtctacattaaaaaactttaatgaattataattatgaattataaccaaattaacaacactgaacctattattaatgatttaagatatgtagaatgttattgatatctttattcattgtgttccttttattgttgttttagggaatataaatatgtaagcgcttacttgtggtgttttatgactttgagcccccaaattttatattcattatcagatcctgaatgttcaactgccacaacttccatcacaggccaactcaggctgtcctagcaggctgctggatgccagtcacattaggctcaattcaggatgcagtatgtgctggagctggcacacacctgctcaaaggagctgatccttaaattttcaggaattatgtgagaagctgttaaacaatggatagcttgaaattggcaatggcaggagtatctataccaaagcaactggcaaatactacaaatcatatcactgcttctaatgagttacaaaggtgtgtgcttacatgctacccaaaaggaacttgaaggccttcatgtgaaaagatcatatgaataaacacaaagaaattagggaataatggccgggcaccgtggctcacgcctgtaatcccagcactttggaaggctgaggcgggcagatcacctgaggtcgggagttcaaggttagcctggccaacatggtgaaaccccatctctacaaaaaatacaaaaattagccgggtgtggtggcaggtgcctgtaatcccagcctacttgggaggctgagacaggagaatcacttgaacccgggaggtggaggttgcggtaagttgagatcatgccactgcactccagcctgggtaacagagcaagactccatctcaaaaacaaaaaaaaaaaaaaaaagaggaaattagggaataacaaactaaaccataatcaagccctaaatttaatataatcaagaaccaaaagttataacacaggtaagtgatacaggtatcagaaatgggagatgtcacagtcaaccaaaattgtggggggatcttcagtgaggagttggaaaggatgcaggaaagagaggagaggaatatcttcaggatcaggaaccagctgaacacagctgaacacatggagccaagcacctcacatgtgtataggggagagtaaagagggcaacacgaatgccacacagcatgcagccctcagggggagtccactgcacacacgcctggcttctgtggaacttggttactggaagtaccacatctgttgtcttggtccagctgtagcagagccatggatacttaagagtttgagaattaaggtgattgcgtagccggtgcctcctctatttcacctgtcttgcttattgtctatatcctctgtttaatcctcatctcgaccctttccatttatgattagaagttctcttcaaaaatatttctttaaaagctttgagggctatttccattttttgctatcttcatttttgttaacagctttccatggttttcctcataatatatgctttttttaaaaaatataacaaatccccataatccagattaaagctaaacaaacgcaccaggcattaagcaaatcacaaactccaggcttttttctgtaatacatgatacaaaacaatcagtaacactcaattccaggaccaacgagaagggagacattataaaaaatttaaaatgtctcaaaattctgtcactacagattggccttttctgaacatttcatataaatggaaccacacaatatgtgtctggtttcttttacttggcagattttttttttaggttcatctatgttgtagcatgcgtcagtagattgttcccttcctcattcacacccatcttcctcccttccttcctctctccctcccttcttctctctttccttcctttcttcctcccttccttcctctctccctcccttctctttccttcttttcttcctcccactctcctttcctccccatctttccttccttctttccttccttccttccttccttctattcttcctctatttctttcccagatagcattccattgtactaatgtactacattttgtttatccatttaccagttgtgacacaagttagggttgtttccactttagaaataactgtgaatcatgcttcagccaacattaatgtgctattctttggatagaaatatgtttttatttcctttgggtaaatagtggatatttgaaagtggaatcattggatcaaatggtcaacttaggttgacatttttaagaaactgccaaaccattctccaaaatggctgcaccaccttatattcccatcagcaagtgtgagggggtcttattcacatcctggccaacattccttgttgtctgtcttttttattataaccattgttctgagtgtttagtggtatctcactgttttgatttgcatttccctaacaacgactgatgttcatcgtcttttcatgcatttatgccatgctttctaataaagcattcatttcaaaatacattcatttgactattcgcaactgatcttttcttgtcactataaatccccaacttagaaaaaaactcttctgatcttaagagtattgtcttggtgtttataaccatcacctaggtgtcagcctgcatggattcttttagagaatggcacccaataattgtcctgtttctgtgtgctacccctttatgtgaacagccctgcagaggaagagcctgctggatgttcctgatggccctccagacctgctcttctctcttgtctcccctcatctgtgctctggaggctgactttgtaccaggatcccttgtgtctggcttcggatggagacacaggcaggtagagagcaacattgaagagcatttttcctctgctccctcactgtgggctgcagtttggaagtagccactgcctttccctgcctagtttttaattctggccaagcagaccctttccaggggctgaatacacttgaaagctcctaccaggagctccctcctctcataccttcagggttagagatggtaagggctgttttgggtgactggtcccttattcttctccacccactgatgggtcccttaaccttgtcaacccttctggagagagcttctttttaactatttatttatttaaatagaatagagatagcatctcactttgttgcccaggctgatctcgaactcctggactcaagtgatgcttccgccttggcctgctgagtagctaggactacgggcaagtgccaccatgcttggctaatttttaaattttttgtggagacagggtcttcctacttcctatgtgacctaggctggtcttgaactcttgggctcaagcaatcctcctgccttggcctctcaaaatgctgagaatacaggtatgagccactatgcccaatctggacagagcatctttaactctcatttttcaagtgtgtcttctcctttttgctgggactctgatacaggagataagcaaaactcctttgtgaaacctaagaccagcacttttatgcataaaacaaatggttagtgctaatgattaacttaaagtagtttcttcagacatatttgacacaacattacccactagtgcctgttcacctctgatcttgtagcactttgggcttttcacaaggacttgtcaccctctaccttgctttgtactcacttgcagtaggagacaattcccaccaccttcaccccaaacagcataaaaatgtaaaagttttttccagtttccctaaagtcatctgagcagctctccctaacccagaggagtgcaattactctaagaacctgtccatacaggcgttttttagtagatgttctttactcagattggagttatgaattgctaaccgtctaaattctctactgattgggagaatgagatgaggagtgaggggaagaaaggaataaagactcatctgaagcttcctaagagggccagcccaggagaaaacagccatgaggcagttcaaatctgcctagccaagccagggacaaggagctgggaatccccacgtgctgtaactgtcacaaatgccacactcaaatgcagatccctgggccactacagattcactgtattaatccattctcacactgctatgaagaaaccctgagactgggtaacttataaaggaaagaggtttaattgattcatggttctgcattgcttgggaggcctcaggaaacttacagtcatggtggaagacaaaggagaagaaggcatcttcctcatagggtggcaggacggagtgagtgtcaagcaaaggcggaaaagtcccttacagaccatcaaatctcttgagaactcagtatcacaagaacagcatgggggtaaccacccctatgattcaattacctcccatagggtccctcacaccacgtgggaattatgggaactacaattcaagatgagatttgggtggggatacagacaaaccatatcattatgcccctggcccctggaaaatctcatgtacccacatttcaaaaccaatcatgccttcagcattaactcagaagtccacagtccaaagtctcatctgagataaggcaggtctcttccacctatgagcctgtaaaatcaaaagcaggttagttacttcctagacaccgtgatggtacacgcattgagtaaagacagctgttccaagtgggagaaattggccaaaacaaaggggctgcaggccccatgctagtccaaaatccagcagggcagtcaaatcttaaagctccaaaatgatctcctttgactccatgtctcacatctaggtcatgctgatgcaagacgtgggtccccatggtcttgggcagctccacccctgtggctctgcagggtacaacctccctcctggctgctttcgtgggctggcactgagtgcctacaggttttccaggtgcacagtgcaagctgtcagtggatctaccattctgaggtctgaaggatggtggccttctcaaagctccactaggcaaggccccagtagggactctgtgtgggggctctgaacctacgtttcccttttgcgctaccctagcagggcttctccatgaaagccctgcccctgtagcagacttctgcctggacatccaggcatttccatacatcttctgaaatccacgcagagtttcccaaacctcaattcttgacttctgtgcactctcaggctgaacaccatgtggaagctgccaaaggttgaggctttaaccctgtaaagcaatggactgagctctacgttgacccctttcagccatggctggagtggctgggatgaaggacaagtccctaggctgcagacagcatgggaatcctgggcctggccaatgaaaccacttttcctcctaggcctccaggcctgtgatgggaagggctgccgtgaagacctcagacatgccctggaggcattttacccattgtcttggtaattaacattcagctcctccttacatatgcaaatttatgcagccagcttgattttctcctcagaaaacgggattttcttttctatcatgttgtcaagctgcgaattttccaaacttttatgctctacttccatcataaaacccaatgcttttaacagcacctgagtcatctcttgaatggtttgctacttagaaatttcttccgccagataccctaaatcatctctctcaagttcaaagttccacaaatatctcaggcaggagcaaaatgctgccagtctctttgctaaaacataacaagggtcatctttgctccagttcccaacaagttcctcatctccatctgagaccacctcagcctggatcttattgttcctatcactatcagcgtttttgtcagagccattcaacaagtctctagggagttccaaattttctcacattttactgtcttcttctgagccctccaaactattccaacctctgcctgttacccagttccaaagtcatttccacatgtttgggtatcttttcagcaataccccactctactggtcaatttactgtattagtccattttcatgctgccgataatgacatacctgagacttgccaatttacaaaagaaagaggtttaattggacttgcagttccatgtggctagggaagcctcacaatcatggcagaaggcaaggaggagcaagtcatgtcttacatggatggtggcaggcaaaaagagagcttgtggaggggaactcctctttttaaaaccatcagatctcatgagactcatccactatcacaagaacagcatgggaaagacctgcccccatgattcaatcacttcccaccaggtccctctcacaacatgtgggaattcaagatgagatctgggtgaagacacagccaaaccatatctgcaagcaaggagggatgtacctttagtagaattaaaccacttatttatgtgaaatactaccactgctatggtctgaatgtttgtgtcccccctagaaattcatatgttgaaatgaaatcaccactgtatttagaggtgggggcttcaagagttgattagatcatgagggcaaagcctcatgaatgagattagtgcccttataaaggaggcctgagggagattgcttgtcctttctgccatgtgaaaatacagcgagaaggaaccatctgtgaaccagagaatgaaacctcactggtgactaaatctgccagtgccttgatcttagtacttgccagcctccagaactctgagaaatacatttctattgtgtataagccactcagcccatgatattttcttatagccgcctgagtggactaaggcagtaatgtaaagattttactagcttttatagtaaaaatctagcttttctagtttgttcttcatatatatatatatatgagcattttcaaacagagtacttctggaagctgaacaacagtgtctcctgttaaaaaattcaaatcctcatccaaattgacatacatgtgctggcgcatatgttgtttatttctctgctgtttataccaaacttttcctgcaaacgcatccatcacacacacatgtggatacgcacaggcacacacatccaaatacactgcaggtaagacccactactactagtctcacagtttcacagtgatgttgggccaaaaacctgatccattattacttactgcggttcacggaagcagctttgtaaacctacataaagattcccccttccttgggaagccataaatgcaacgtttcactgagcagcatggaggcagggtgttaacctgctgtgtgactgctttcaaagagccagcactcctcagcagaagcctaatcatctctgtggatgtgctgtcctgggcctgcttcgataagtgctgtttatgtggctgtattttcaagatagcatggagggatgctaaacttggtatttgaaatctgtttttcctcacggcagcaacaagcctgcagcacagcgctaccagccagctagccaaccccacagccgcctgttgggcaaaggaaccctggaactcgttgaggttgcaggaacatacagaagatcatttctcctctttcattttcttgctgccttttctttcttaaaatcttaacgtcccaaaggaacaactgatgtgagtcagtatgtgttggcagggcaggatggtgtgtgtgtgtgtgtgtgtgtgtgtgtgtgtgtgtgttcgtgttcattcttcctgttcctgttttcccacctcagccttgggtgtcgatgaaactttttttttttttgagatggagtctcgcactgtcgcccaggctggaatgcagtggcacgatctcggctcacttccacttccgcctcctcagttcaagcgattctcctgcctcagcctcccgagtggctgggattacaggtgcctgccaccatgcccagctaattttttgtatttttagtagagacggggtttcaccatgttggccaggctggtctcgacctcctgcccctgtgattctcccgcttcagccacccaaagtgctgagattacagaaatgttttatatacctatttgctccaggcagagtttgaaggcagagacttatatcaattagagatccataaaagccagtgaggtgacatgaacaaaagcattcccaccaacactggaagtattcaagccagattttaaacatgagatttccactttaggataaaggttggatccgataactttgaagatcctctgccatttaaaaattctatgggccagacgtgatggttcacgtctgtaatcccagcactttgggagacagaggcaggaagatcacctgaggtcaggatttcaaagccagtttggccaaggttgtggcacatgcctgcaatcccagctactttgaggctgaggcacaagaatcacttgaacctgggaggtggaggttgcagtgagccgagatcatgctcctgcattctagcctgggcgacagagtgagactctgtccaaaataaacaaacaaataaataaattaaataataaatacaaaaataaatattctgtgatgccatgatcttactcccagtttaatgaacagttctgatggtgatgtttagagtgaaactcatagtttccttgaatattttcctactttgcatatttcccaagatgctttttccattttgaggaagatacaagataagatacttctcactgaaagttctcctttaaggggagaagcaatggcatctgaatctcaaagtttggaaaaaataaaccgttttttatctcttggctgaaggcaaagtgaagaagtaaccacagctcagctctgtggagagtgggggtggcagatgggaaggtgaaggaaggaaaagcaaacacagtcagccctccctccacactggcatccatgcatccacggattcaactaaccaaggaccaaaatatcccaaaaataagaagaaaaattaaaatgacagtacaatgaaaaaaaaatacaatctaataagacaatagagcacaacaactatttcaataacatttacattgtatgaggtattataagtaatctagagatgatttaaagtatatgggagtatgtgcccatatacacaatggcaaatcctatgccgttttatataagagacttgagcatctccagattttggtatctgaggggaatcctggaaccaattccctgcagatactgagaaacaacgctatgctctgggcagaagtacttccagaagagccacacgattgttcccctatccttgctcaacaaaatgccagcatcagaagaaacaatggaaaaacctgattctttcacaagagctgacctctgactataaaggatttagggacaagattcccaacctactctatatggcaaaggaagaaaataaaatgttatcttctttctccccagaggtcactcattgcttttcctctccaaaatatgcttgtcttagttcattcagcggctataacaaaataccatagactgagtgtcttatacacaacaggaatgtattgctcacagttctggaggctgggaagtccaagatcaaggtgacagtggatttagtgtctgctgaggacccactttctgattcatagatgatgctttcttgctgtgtgggcactaatctcattcataaaggctctaccttcagggcctaatcacctccccaagccccagcctcctaataccatcgtattgggggtgaggatttcaacatgtgaattttggggacgtagaaacactcggcttatagcagtgctctttttattttgccttactgatagctaaggtcactctgtgtgcacatttatttcacacttgaagcatccctggtgtttttaataatcacctccagcctgtcacgtgaaattaataacacacacacacgactccatttttcatcaaggccaccttccagaaagaaattactctttgactactcagagaaaggtgcagagattattataaaaatcaggagaggcaatgaataatatgaagaaattcagtgtcccaagttcttttcctcccacacttatttgtagccagtgtgatcattccttatgcacctaaactgcataatctaaattaattccaatgtgttgtagagtttcaccaccattacagtttgctgtgattagcaaaccttaacctagtgccttcatgtagaagtatgactattttcacagttttgtatgaatgtacttgctatatgaccttgggtaactcactttaccttctttgtcttggtcttttaccatctgtaaaatatagtatagtttttccttctccatattttatgattaagaaaaaatagaagatggttagaaaataataggaacacatgattcatgcaatcatgccaaaagtaccaggaaatcacatttcaacatataatttctatgcaggttatcagtaaagcacatctttaaatcactttcaatcaattcacaaggtaacagaattttgatttttttcccctttttaggtgcggattaaatatcccatctagattaagttttatatatatatatatatatatatatatatatatatatatgtaagaatcaatgcaatatcatataggtctcaaaatacgttattttcttactccttctttacattcttctcattaagtcatttttttcacttaacaaatattaattgagtggctactatattccaagaagtatgttaggcatcacaggctctcattttatctatatgcctggtgacaggatagctttgccttgactatatggtgttttcaaattttctttcttttctttttcttttttttttttttttttgagacggagtctcaccctgttgcccaggctggagtatagtgtgctatcttggctcattgcagtatctgcctcccggatacaagtcattctcctgcctcagcctcccaagtagctgagattacaggtgtgtgctacaatgcccagctaatttttataattttagaaaagacaaaattttgtcatgttggccaggccagtcttgaactactgacctcaagtgatccacccacctcggccttccaaagtgctgggattacaggcatgagccaccatgactggcctcagattttctattgacttcatttctatatagccagacagtaatgaattggttctgctgaaaactgtggtcaggataagttagaaacccttttgtttccttatgtatgtctttctaaatttctgctgagctacatcttaataccttattcccagacctcagctcagtgccccagtgcctgacacaaaataggctcaaataataattagttgaaatataaataatgatcataatgctaaatgacaaacagcccttctactactgggtgacctcgggcaagtcactgcatctgatgctctcttcattcataaaataatagacaaggctggtggttgctaaccagctgggtcaagactggtgttattgtaaagatgtgaaaatgcatatacattctataataagtcctacataaaaacagaatatactatttgtcatatatatatgtatgtgcgtatgcacaccacacataaaacaaataacagttttacatgcatgtagattactgtgtctaagaaaaccagtatcatttaaaagcactgtagagtttataacatcttttggctactatgtatttcgttaatgagcacatacaaaaatgtaaaattacaaccattttgacattctaaaacaccttcacactccaacagggcatcactggattaaatgatcttcaatgtcctatctagcacaaatatctgtggttccaattcaacagaaagcagaaaatatttctcaagtgttagctatatacacagcaaacaaccaagtggaaagcagaaaatacagccaatgaactctacaagtagaaaatgtgagcattttctctttttttttgagatgaagtcttgctcttgttgcccaggctggagtgcagtggcgcaatctcggctcactgcaacctccacctctcaggttcaggtgattctcctgccccagtatcccgaatagttgagattacaggcatgtgccaccacgcccagataatgtttttgcatttttgtattttttgtagagacgggctggtctcaaactcctgagctcaggtgatctacccaccttgacctcccaaagtgctgggattacaggcatgagccactgcacccagcctcattttcttttttactaaagctgctgccatgactggctttatcatgccactccccctcccctgtccccaaggtacactggcatggtcctgctctccagagtaagttctacacataaatgacccttttccctttgtccagtaaatggctgggccatgtcctttaaaccagcagtagctgttaactcttggttaaccacaccccatacccacaatgtcaagcaataaatgtttttgggagataactaaagaggctgctggaaacatttgctgcatgttcaatagtgactgacagtggagaggagggagtggtgggcatttcttttatttttatattttgagatggaatcttgctctgtcgcccaggctggagtgtagtggtgggatctcagctcactgcaacctccacctccagggttcacatgattctcctgcctcagcctcccgagtagctgggattacgggtgtgtgccaccatgcccggctaattttttgtattagtagagacagggtttcaccatgttggctaggctggtcttgaactcctgacctcaagtgaactgcctgcctcggcttcccaagataggcatttcataagaatcatacaacctgtcctccctgtacctggggcatacacagaccaagggtacaatgcgtatgagctaaagagatcctggctgcaacgtatttgagcaaaaaaataataatcatttgtattatacaatgaagagagatgatgaaatggttgtgacttatttgagaatataaactatagtgatcaataaaatcacatttggtgcggtatttaacccatttatagagatgtatattttcactctatgttaatttgcagggacatttgagaggaaatgtctgtataataaaaacattaaaatagaaatatttcaatctcagttttgcctaaggccccaagtccttgtttatcaggatttgaaaacaagataaccagaaaaaaaaactttatgactctgagtccctcagtcatcttgaggatataaatctgatatgtatattaagggttcaaaatggtaggattagaaattaaaataaggcttatttggataaattgttctataaaccccctcccatagggagtgtgggggagtttgcctctcacctcaatccaagagaaaggttttagacatcttgatatgtagcccctggggtttggaaactgtattagtcagtgttctccaaagagactgaatcaatagaatacagatatagatgtagatacagatagatgtgagggaatttattaggggaatggagtcacacaattatggaggctgagacatcccacataggccttctgcaaactggagaaccagagaagccaggagagtggctcagtccaagtccgaaggcctgagaatcaaggaagttaatggtgtagctctgtctgaggccaaaggcacaagaacccagagggccactgttgcaagccctggagtccaaaggcgggaaaacctggaatccggatgtccaaggccaggagaagaagggcatcccagctccaaaagagaaggtgagcaagagtctgccccctccttccaccattctttttctatctgggcccctagctgtttgcacggtgtctgtcaacatcagggtggatcttccccactcagtccactggcgcacatgctagtctcctgcatacacaccctaacagtcgtgcccagaaacaatgtttcaccagccatctaggcatccctcaatctagtcaagttgacacctaaaattagctatcacgcagactgatgtctgatttgtgctataacatctatggaaagagagacggtagcggatacgcagttctgattgtggcctgaagagagggcaacaacctgtccccacagagagtcagagcaaagaaagcccaagttccttagactctgctcaggaagcctgtccagccatgcaagaagactccagcagaaggaaaatgaaggggtgccacctgcatgcagcgggtgaagggctgaagaagggatcctaaacaaccaggagaggagaaacactcaactctgtcaaagacactgcagataggagatgtcaagtgaactgacaggatggattaggaactcttttttttttttttttttttttactttaagttctgggttacatgtgcagaacgtgcagttttgttacataggtatacacatgccatgggtttgctgcacccatcaacccatcacctgcaacaccaggctgccacaacacttgggttacacctaatgaggtgactccatttccattgtattgctattctggttagtgagaagacacactataggataaagtttgcattagaagagccaggaaaatatgaagtagaattcctctttaattaatgttaaagaacttaatcacagagggagaaataaatgttcacattggcacccatcgatatcatgaatggaatacaagctccatggtaccatgtgcttcctctcttgtaggatatggactgagccaccttggcaaactatgcccatggtatattcacttcatcaacaaagctagtccagaacattctatgcatttgcttcttataacctgattcttggccacttaagcagcattctcaatgcttccaatgagtgaaaatgaaaaaaagaggacaaaataagccaataattccagctcattagcagccaaaaaaaaaaaaaaagatctttgggcaagccaaagttctaaggggaaagggggaataacgacctaaagaccagtgccacgtatgtttgatactcttaactgtaactctggaacaacaacaacaaaaaccccatccaggtttaaaaatatgtgtaaaacaccatattataatataatctcatgtttattattttaaagtaggaaaatgcagatagtgtgtcttttgcatcactgttgaaaatacgatcattcattgaagacagagcagtggtatcctagttaaaactctttcaagttattcaacaataattgggagcttcatcaatagcaattgctattttccatcactgaatgcaactcattcctgaagcccattgaacactccagaatattgtgcaggcgtaggtcttgctgactcagttgtagccagcaatatttagtcatgctcctcgtcaggtacttctggctctctatgatgtggagaaatggtaggaggatgtcatttggacccctgtgttcaatggagcaatgtggttggttctggccaatgagctgtgagtggaagagacctgccgcttctgccgagcatttcgtatatgtgtgggtgtgagtatactctccttctcctcccatggtggccagcaacgttccaggggctgagccccctgagaagcaatgcccccatttgccagagtcagccatgtagtatgagtgaggaagaaaactttgtcttaagcccatgagattcaggggttatttgttactacctgttaacctcccctgactgatacaaaggtcttattgtctacctccttactgatattgactgatcaggtcacttactgaatatgcctggactgcaactcagtgcccatttttattttaaagatcgatgagttgttttatgattggaacttggggtaatacaaataatacatttcccatacgagcatcactaagagtaaacattgactgacaatgaatagtcattgttgatttgcacataaacccacaggtagattttgttcattttgtaagatagaaattagatgcatttgtcaggctgatgactgagggtgggagcatcatggagagtcacattagaagtggtgacacctgccatgagggcacagcatttgtgcaggtactgtgagaccaaatgcactgccttcaagctggatgcaatgtaatcaatccactttaacatgagtaatcattgctgagcatttaacatgagaatcatattataacacatattatgaggcgctgaacaatttggtgaagaagagagttatacaagttatatcgatgagttcagatgatttgaaaaaaaaaaagtggttagatttacaaaaggcaaggaaggaaaatgtgtaaagggaaatactctgtgctgctcctccagaaagacattccccaacagaggggggcttgccccagtgcggtaccacctgtgttggggcaggtaagcccacctctttgggtgttcagcattggataacacatttacctgcagatctaaaccacatcccgcagtgtagactttttcagtaataatggtggaaacctgatctccttggccttactactttgttctatgtttcaatttgtccagaatagggacagagaagcaagtgctgttgattggtctcttcaaatacagcaagggaaagtcctaatggagaagccagtcttaggctgagatgggaaggaaggaagaaatggggtttgaacgtgaggaggatgggaagtattccaggatacagtactatggcacaaaatcaaggactaaatgcttatctgtctattttttgagttctgtaaagtgctttcacatacatgataaaaatgtgtaatggcactgatggtcagtgtaaatcctgtgctctcttctgtatccaaacactggcagccctggactcctagtgaaggagacagacatgtgtcctgtttttgtggcgagattctagtggtgaagttagacaggaagcaagtagtacgtatataaagtattttcagatactgattagtgccatgaatgaaaataagggagggtaaggagacaggatagtggaggctcgctcttctgggcagttggttaggtctggtctgtgaagatgggtctttgatcagagtcctaactgcaaggagacaaagagccccaaggagaaacaggaagggaagaatctcaggcagcaagaaaggcaatagtacagaccctgaggggaaacgtgtttggctgtggaggaggccagtgtggccctaggggatcaggaggggtgagtccaggggaagaaagccataacatgcaagtagcagctggaggaggaccccaatgtccaaggtcaggggccctgaaatgaaagaaaaggccagtgaaagccaggactgtgcccagagaaggcgaagtgattagaacactcttgaaaatgaatctgctactgggttagggtgtctccccgaatgtcgggaaaactggccagaggtcattaaaatattgcaggtgcgagataattagaacctagccttgggcagttattacaggtgctaaaatctgaaaactcaaactgaggaaaattggcagagctgggagacttattggatgacaagggcaaagaggagagagaaatggcagacaattcagggtcactggctgactttcactgtcagtgatggcagacgtgggaggggaggccatctaacaaatgctcacgtctagggcttatgtagtcaacggtgagagcaacctgcaaaaaaataaaaaataaaaatactgttccaagagccattttttaaaaaaagaatgtcacgcagactgaaaaagaaaatcaaaataaaatcaagaaaagggattgtattacaaactcactattctcaagataaactgaaaaaggcaaatttcatacttagtaatgagaacaaaataaacactttcaattgattaatattgcaatacaatcattttgattatgtgtctttattttatttgttattttttcagtcagggtctcactgtcttgcctatgctggagtgcagtggcaacctctgcctcccagtccaagcaattctcccacctcagcttcccaagtagctgggattacaggtgcataccccgaggcccagctaatttttgtattttttggtagatatgggtttcaccatgttggccaggctggtgaactcctgacctcaagtgatctcccctcctctgcctcccaaagtgttgggattacaggcgtgagccacctcacctggccagattatgtgtctttaaaaaataaaaatgaagacatgcataaattagtatagtagaaggaaaaaagagatacgacaccttttatcttttttagggatcaatgaaaggccaagagatttgagaactgtaagaaagccctgagaagcacattgttcaaaatttatgctcacttgaaaaaaagaaaaaaaaaaaaaaaaaggaaatgacctaggctgttacaaaagttaaacccaaattgagcaccttttaaataaggttgtcaaaggttaagtatgtttgaggtaaaattatttccccagtctcaaaatgaaatttccagtagactttagaaaaaaaaaatatggaaaacaaacatacatggagaaactgcattttacaactgaacactgggtttcaagtagagtgatttttaaaaatctcatatttagatactgtctggttttaaaaataggccaaatggatcataggctgagaatcagaaatccttcttttgggttgtctcttctccgtaagcctcaagtacttcttagtcctttcttcatgactagataaaattatagtaactaccacagggattatgattcctagtcaaacatcaatcatagtcctacacacaaatgatgtcaagtgctaggcactgtctaggttctataatattagagttcctaaatttacacacgcacgcacacacacacacacacacacacctgagatagaggatagaaagataaatgatgatagatagatagatagatagatagatagatagatagatacatatacatagacagacagacagaaagatagatgctaggctgggagtggtggctcacacttgtaatttcagtcctttaggagcctgaagctggaggattgcttgagcccaggagttcaggagttcaagaccacctgggcaacaaagcaaggctctgtctctatgaaacacaaacaaacaaaaaattagctggacatggtaacgcacacttgtgctcccagatactaggaaggctgaggcaagaggatcacaggagcccaggaggtcaaggctgcagtgagccatgattgtgccactgcactccagcctgggcaacagagagagactctgtctcaaaaaaaagaaaaaaaagaaagatagatgctagatagatgatagatggaaaggggaaggaaagggaaaggggagaggaggggaggggagacgaggggaggggaggggaggggaaatcccttcaccgaagacttgtaggtcaggtctcaaagagcagccagcagacagccttcagctgtcaactacatcagggattgacccagctgcagagaactgcctcacacaaggtcacaccccttcctgggtgactcacaatcaactgacacaatcaataaaacctgtctgtcttgagccaagttggcacaactctgaagatccattctgattgtggagttccctgtgaggtctgtgtggctgggcctgcattgtagctcaatttctccccctcctcactactgtctcctctcttcccttccagatgtcattaccaaggatcctttttaattagcatcctatattccaaactctaaccacagtctgcttcctgtacttgcatatattcattacatacatatgtgtgagtgtacatatatgttttaaaaatccctagcaagagtaagtacgttatttggtcagtcagctgttaaaacttccactttctccagttgtctggtggaattaaaaaaaaaaaaagactttcacttttattagtgcaattcatatcagtgtgccactggtagctcttggaagagaaggaagagagagctaatatggaacctggagacaagttccactctgctcctgctgaatgcccttctcctttgcttctacctacctccagaagtgctggccattgtcagctcctgaaaaggctgatgctctgacctgtttcagtgaacggggagaggacttgaggctgggaaacctttggaataggcaaggggtccccctacataggcttccctccatgactcatagtgtgttccttggttcgctccctgtggtcaaccacctgctgcaaaaagtcgttcactgctggtgtgagaatcattgtcacctacactcaagtaaaaatgtgtatcaaaggaacagatgcttctcttccatgcaacctgaatatagatctatcaggcaaattcagacagctgttctagatgcagagaccatcatatctgctaggggtcagcaaacactgaccatggctcaaatctggcctgccatcagattttgttgggcccgggagtgaagaatgttttcaggcttttcagtggttgaaaaaaataaaataaaaagcataatatttcataatatgtgaaaattatataaaatctaatttgtagtgtccataaataaacttttttcttttcttttcttttctttttttttttttttgatactgagtctcgctctgttgcccaggctggagtgcagtggtgcgatctgggctcactgcaagctccacctcccggtcacgccattctcctgcctcagcctcccgagtaggtgtgactacaggcgcccgccaccacgcctggctaatttttttttttaatttttagtagagacagggtttcaccgtgttagccaggatggtctcatctcctgaccttatgatccgcccgcctcagtctcccaaagtgctggaattacaggtgtgagccaccacgcctgtccccataaataaacttttattaggacacagccatgctaattcatttacatattgtctatagctgcttttgatccacaatagcatagttgggaagttgtgacagatacctgaaagccaaatatgtttactatctggccctttgcagaaaaactttgccaaccacagagctatgcgatttaggattatacaacacaatatcacacatttgcttattggtgaacatccaatgggtggatattcacacagatatagacttgttacctgtacatgtctgtaagtatctggcctctcataaaacactaaacaccttccacagaagtgcacaatgatgtagagaccccacgttatgctcaaacccaagcgctatctttcttcacatctttttagttcaaaatatctgccttaaaacagaactggaaaaacaacatttgtcaagtaagtgcagccgtgttaatgttaaatagatgaatgcatggatggatcttttaacatacaagcaatggagaagatatgccagcaatgataatacttgtgttagtgtgaagggtattttagatctgccccaaactcaggtagaaaaagtttccctgaccttttccctaccagtttagaattttaattcatcccagagagtcagtggctttgacacaatagcacttactcttcagatgcctaaaattttatggtcaaaaatatcaaaagattagaaatgtgattttcaatcccaaaagccacattgaagttcaattaaacaaaaatgcctggggttttcatatgcactgaaaatcataaaaatcaattttattacaaatctacccatgaaaccgtctatctgtctctccatccatcaatttatttctgcaatatgtctcaaaatagcacccaagagtttgtgccaattcttatttttcaagatatatgagctttttcaagttcacaagctccataaacttcacaaactccatatggtgttcacaaaggaataataaatgttttttatcttttacattgtttatgaacacataattcatttttactatatcaattgcttgcctaagaagttacaatgcttccttttctgcttattctggcttacaagcctttcagaattgaatcttacctgatctgttcaatattacattctacattacacacccaatttcactgtatctcacccacctgtcttcctacacactaaagcccttactcctcctaatcgccatgttttcattatctccatgtcccttttatgtgttgttctttctacaaagaaaccccttttctcctctttttgaaaaacacctacttatccttctagaacaacctaaatgtaggaactttccaaattctccagggaaatatagcccttccttccttccatccatccatccacccacccactcacctactcactaatttatcccttactgaacaaacatactgagcatctattagatgctcaaaaatgtataacaaataagctatttctgcttggtttataaggacactgagatatcagcaaagtgttatgggaccgaagaagaagaaaatagaagaaagacatcaaagtcaaactggaagtaggacagtttggaaagcatttcccagaagaggtgatactgagttaagtatacacaggacaagaattatgcagccaggtggatgagggatgggaagaggagaaagggagagggtgttctaagccaaaaacacagcaggtaagaaactgagtcaccactaggaaagttaaatcaatatggcagaaagaaaacctgctccttgggtcatttcatcatgcgtttggtagagcacttacaactttatattaagtaatatgggcttgaggttctgctttagataatatggacttgaggttcttctaccttttattacctgtcagaaatagggttttaatccctgggaggtgaagcttgcagtgagccaagatagcaccacggcactatagcctgggtgacagagcgagactccatctcaaaaaaaaaaaaaaaaaaaagaaaaagaaaaagaaaaagaaatagggttttcatctggaaatatttggggctaagtgttgtcctgaaaggaactttggaaaagaaatattccattacacttgctttgtcatcttgtgatacagactcagcccatggatcaacaaaatgccttcattctcaacagtccaaagagctctgggtaggatctcaccttccttacaaaattcatgtcagatgttgaataatagacattattctgttcctcttccaagtgagagacaatgagtggctcatcccctgaacggtgtgtggaataaggtgaaacatgtagcaatcaagaaactggactcatcccctgaacggtgtgtggaataaggtgaaacacgtagcaatcaagaactggactcatcccctgaacggtgtgtggaataaggtgaaacacgtagcagtctagaactggctgcagaatatatgtttggattttgtaactttcatgctcccaaaactcagagtcatttttctacattggctctttccctgtattatcaattgtacccttcacataacaactgtttcctaatggcaaccaatcaattcagaattcaaatggcgattcgccagtttgatatctacgttgccctggggttatggaagaagctgcaaattttggggtactgttccagcttattaaatctttttattgaaatttgattcatcttttcctgaccttatcaaaccatcccggccttgtcatctacagcaggactttgcaaagtggactcctgtcgcttgctgcattttactggtgtgaaatcagaaggagtatggtggataatgcattttgaatccggttagacattaattattaggttggggcaaaagtgatagttttttttgccattaaaaaaccatgatcacttttgccccaacctaataacacccaaaccacctgtagaaatgatttaagaaatcttcaactcaaatgccttctttcaggaggagttttaaaatagaaattacatcattccaaggttgtgtctgcatatgcagttgtatcaaaaaacttaaatgtaatttttgagggaactaagccaggagaaagggccatagtgatgaatgtatccaaaagtagccatcagagaatccgtgagttcttacactgacacaggaagaccactgtgtttgacagatgcaaaatttccattcagatctggtcagcactcttcacctaactggtgtttttaagagataattaaaactgtttgcacaatggcacagtccatgacacattaataataataactaataacacattaataataataactaataataactaatggcacagtccatgacacattaataataactaatatataataattatattattataactaataactaataataactaatataacgaattatattaatgatagtaactaataatgtgaccatgacacattaataataactaatattaataataataactaatattcaatttaattctcatttctataagtgccaggaaatttgctaacattgtatgtatacatgtaatacatgtacattacatctcatgtaatcataactgttttattgcttttttttttttttttgagacagagtctcactctgttgctcaggctggagtgcaatggcaccacctcggctcactgcaacctccacctcccaggttcaagcgattctcctgcctcagccacccgagtagctgggattacaggcgcctgctaccacgcctggctaatttttgtatttttagtagagatgagtttcatcaccttggtcaggctggtctcgaactcctgacctcaggtgatccacctgcctcggcctcccaaagtgctgggattacaggcttgagccaccgtgcccggccaactgttctattgttaaagcaggtagctaggcagacgtgagcaggtcaggagaggacccccaacccctccccaggaatgtcagctgaccactaggtaatggtcaggaggttgttaaactatttctctaaaataataattgattgcagctggtaccaaagaaagaccgtctcccaatagatataaaacacctgaaactggtgatcagcttccaaataagatctcagaagttgggcgagcacgctaagcatgtgcactaagaggcaaaatggcggcgtttaactggtatatgagcttcctccaggaacgctctgctggtaagggaaaaacgcctcaagtgagcatgcacacaacttcagtaaacacactgcgcacgcagccccttccaagtgctgacaggccactgtacatgcggacagcccgctccgaaggaagaatcaggggagaagaaatgcaagcccaaaaaccctgccaaggtataaaaccccagtcaaggaccggatggggcactggatctctcaagtcacccacttggtcctctggcaagtgtattttgcttccttttgttcctgccctaaagctttttaaacaactctgactcctgctctaaaacttgcctgtatctctcccgctgccttaaacccacttctaccccttggccaaattctttcctttgaagaggcaaggatcgagtttctgcagacccatacaggttctccactggtcacaccatcaagtaagcattatcattattattcccattttacagaagggaaaactgagtcttaaagttataagctttcttccccgagttcacacagctaataaatacaagaggagaatttgaagtaaggcagtctgactctggttctaaaccaagtttatagtctattgatagctgttgccattgttaaagcccatgtcatatttagaatatagttccagagttggcacattggaaatgacaatattactttaaaaaatgtgttgaagatgggagttaaattgttttggaatttgccactacataaactatataataggggcagatatgagcagtgtcagattaagcagagacaggctccgtggccaggaaggcataaccatttgcggcttaacacagccaaaaggtcagaaagggggttcattcgagggagccaggaaacggggcctgaagcaagacttggcagtgacctcctaactttatcagtgaaaagaaggtgatttcactcagcctgctcagtcctagggctcagtagctttttgtggagatgactgcatagcacccctcttttcaaatacagggtggaggaaatcaaaatatctcaaaacatccttctcggacatattttgagatggatgttcagagggccagcagatagaagtagccatgcaaagctgtcttttgtcggggagatacacatctgcagagaaaatctgcattgatgtagccaggctttctccaagggcctcccctgtcctcttccagatctaggaaagattaaccgactgtcgacacctttgaaggtctgaaagaaacatttaccatctattctctctgagggcggctacctgtgagatttcatctacataacaagtgatctttgctagccagggctcctcttctctccctcccataatcacaacctgttttgccacaatccaagcccccattctttctgcaacctcaagatggtacataagcttctgaaccccactggggagttgggataatcactctgcagttttcccccatgcacatgttatctatgaacagaaggacaagttagttaccctctcctcacaacccacacctcaccaacaagcaagccatcaattttgcagcagactgaagctggaagtcctctaattcagttccactctgacactctcttcctggagatagcgtcagatcccacaggttgagggctcagtccccaagaatgccccttgcttctgacgcgaattacaagtcccagtttatttcacctgtgcttctgacagaccagctggaaattagagatcccatgatcccctgcttgagttcaattaatttgctagagtggctttctgaacctagggaacacttatgcttactggtttattataaaggatattacaaaggatacaggtgaagagatgcatagggtgaggtatggaggaagggttgtggagcttccatgaccttcctgaatggctccaccctccaggaactgccacatgttcagctatccagaagctctcagaaccctatcctcttttttttttttttaagcttcattatgtaagcatgattgactaaacctttggccattggtggtcaacttaaccttcagcccctttcccctccttggaagttgaggggtagggctgaaagtcccagccctccaatcatgcattggtcttttcagcgtccggtccccatcctgaagccacctagggactgccagccatcagccaactcattagcatacaaaaagacatcacttcggagattctaaggattttaggagttgtatgttaggaaatgggatcaaagaccaaatatatattctacaatatcacaggagtccttgaccaaactagataggccaggtctggcagactgttgctagctttacctcatctttcaatttttctagagaagtcagatatctgaacattaatgtgaaattttccatgtttaaaaaatactgcgcaggccaacaaaacacatcccctactcagattctgcgcatgggccaccgatttgcaagtggcatgtgctcatatgtacttcagatcaatacattctaataccgaggcaacttttttctcagtaatctaaatttagggaactattctcagaattgcccataggtcttatataatctgaacatcacaagagaactcaaatgactataaccataatcgtagaactgaactgtgtcattcacatgctgtcatatccatcacatttccaactcattccaagcaaatcctcagctgatcctgtgtaagggctcactccttccctatgtgcgttctcatcatttgatgaacttaactttggcaaggagctagaagacttagctcttgacaccacagcatgagatgggaactaaattggtatatgacttgattcttgggcacagcagtttatgtttttaaccaacactcattccagaagtagactacataagataagtagcatacacacatatgcatttcttaaactaccgatttaataattcattccccaaatacttaatgattgcataccatgttacagaatctatgctaggggtcgagcacacaatatttagacacatgcacacgtatgtttattgcagcactattcacaatagcaaagacttggaaccaacccaaatgtccaacaatgatagactggattaagaaaatgtggcacatatacacatggaatactatgcagccataaaaaatgatgagttcatgtcctttgtagggacatggatgaaattggaaatcatcattctcagtaaactatcgcaagaacaaaaaaccaaacaccgcatattctcactcataggtgggaattgaacaatgagaacacatggacacaggaaggggaacatcacactctggcgattgttgtggggtagggggaggggggagggatagcattgggagatatacctaatgctagatgacgagttagtgggtgcagcacatcagcatggcacatgtatacatatgtaactaacctgaacattgtgcacatgtaccctaaaacttaaagtataataataataaaaaaaaaaaaaaaccagccctgaaaaaaaaaaagaaagaaaaagacaacctggtaccaaacctcaaatgcttttacccaacagcagtagttctcaaaatttggcccccagatcagaagcatctgcatcggccactgagaaattgttagcaacacaaattcgtaggccccgcctcagaacctcagatctactgaatctgagagtctgggaaccaggctcagcaatctgcgttgtaataagccctccaggtgattccgatgcaagctcatgtctgagaagctcatgtctggagaacatctgggggtggggaacaggggtagaattcaaataaaaaacacaggagactgatttacacatagtggccagaaaagcatctcttaatagatgacagttgaacctgaaaaatgaaatggagtcagtccttgaaggataggaagaagaaaacaggatgagtggggaaaacattttagggagaagcggcacacagcagtgaccttgtgcagacaaagaagtcagcgtatgcaaagaactgatcaaaagaccctctggctggagcccagcaaatgagaagagaatgtaataagataagattgaatcaatgactccggagtagatctgaggtgcagagatggcaggaagcgaaaggatgaccctgacggacaagagctggggctgagaatggggaaaagtttatgatttcagaagggagggagtcactctgtagctgaccaaggctgagataggcagggccagagattttgggtgtaaaaacttcctagaaagtgcctttagcgataattatttgcagacagaattatcgtgaataagtaatcagaagacttctgagtttttgaaagactgtactatccaataaaccacatttccaagcttcaagcccctgccagtcttcagattgcaagagaaccctgggccccaaagcttatgctgactatgcagtgccaaaagcagcatattctgcaatgtccttttttgggtaaggtcatgaataatgtgctaagaacaatctcttgaagggatgagacagagggcacaaagagagtgaacaatggaattccttccagaaggcagaatcaggccccatggagtaaaccccatattctctactgccagcgatgggaatctgttattcttgaccagtaaaatgtgttaattgctatgaaatactttctggcctgtgtttcccatcctcttcctctccaaatgagagtttttattacagtttcctgtgccactgctccattgaatatggggtaatacagggcatggataacctgtcttttagtttgtcagtcaccaaaataagaaaagcaatacacagacccgggggagaggacgtgaatgacacaggcattctggacttcagttcagatgcagtaactggttagatcttcgggcttgcctccttttgggagcaggtgagtgtgttatgtgtggggtgaagaatacatacaaatacgtgtttggccgggggcagactgaagcagattgttggatttcctccagtattcgttcttctcatctttcaatgtaaataaagtcaccaacttctgactgagcatacgccacctgggataaatgccaaatttcccagcctgccttgagatccggtggggtcatgtgactaagatctggccaatgtggtaaaaacgaatgtgtcatgtggcatcaaccaggagatttccacagggacagctgtactctttggtcctcctctttttttttttttcttgagacgagtctcgccctgtcacccaggctggagggcaatggcgcaatctcggctcactgcaacctccacctccttggttcaagcgattctcatgcctcagcctcatgagtagctgggattacaggtgcacaccaccacgcccggctaattttttgcatttttagtagagacggggtttcatcatgttggccaggcttgtctcaatctcctgacctcatgatcctcccgcctcagcctcccaaagtactgggattacagggatgaaccaccacgcccggcctgatccttcttttatatttccccttcctctttcctgctgtcagttacccaaatattacctcggacaaagagccaggtctgtactcctggggtggtgtggtcatggaagctggaaggggcaactgaaaacatcttggagcaaagccttcagactgcatgtcttcaagactcttgtgaaaaaaatgaaaactgtttatttggaatttctgttatttgcaaatgaacttatcttaaccaatatggactcttggccactaaaagtagcttaaattttactccaaatgcactagcaacccatgagagggtttcaagcattgagcacaataggctctgctgtgttacaatacttttaactctgcaaggaatgatgagaaagaggatgggggtataggccatgtggaaaatggcaccagcaaatatggtggattcaggagggataaaggggggacatttttgataggttttagaggtaacatagtattttttgataaatttgatgagattgaagagaaaaataaaatattatctatatctcatggataatacaagtgatacttatttttatcaagttagttgacaaatagaaatttctctgggaaattggaaatatatgcatggcagatactcactagggtggctcccatgattcccgccccagcatcagtatctttgtgcaatctcctcccctcgagtgtgtgctggacctgtggcctgctttcaacaagagaatatggcaaacttgatggggttatcactcccctgactacgttatgttatatcacaaaggttgggggattttgcagattttgttcgagcccctatagagttaataaaaaggaatatatatactgcatgggtctgacctaatcaggccctttaaaaagcatctttctctctctctctgtctctctctctctctccccccacctccccacctccccaacacacacacatagagagagcgagagagagagaactaggccaagagcccaatgagcagaggtagaagtcagagactgcaggcagcaattactctctctccattgctggtttggaggaagcaggccaccatgacttctacagctgcaaggagatgaactgtgcccataacctgaagaagctaggaagtggatcgttcctctcagagccttcacataagaatgccacctggttgacatcttcatttcagccttgtgagaccctaaacagaggacataaactgtccccagactcctgacctcctgactcacaaaaactgtgaagtaataaatgggtgtttttttaagtcactaaaaagtttgtagtaatttgttctgcagcaataggatactatacatacatacatttatacacacatgtaatatatatgttatatacattaacatgtcaatgtagaaaatgatatacatgtatctatatgtgtatgttccttaagtttatcctccttaagaaaatcaagtccttttttcatccacaaatgcctgtgaatgtgacaatgtatgtctatgtatgtgtgtttctttttttttttttttttttttttttgagacagagtctcactctgtctcccaggctggagtgcagtggcgcgatcttgggtcactgcaaccactccctcctgggtgcaagcaattctctgcctcagcctcccaagtagctgggattacaggcacccaccaccacacccggctaatttttttgtatttttagtagagacggggtttcaccatcttggccaggctggtcttgaactcctgaccttgtgatccacctgcctcggcctcccaaagtgctgggattacaggcgtgaaccacccgcacctggcctgtatatgtgtttctttaggctataattgaaaacagaatattgctactttgactttactgatggctagtataagatgaggtcatttcttagttataaaattaggaatttacctattaaacagaagaaattcaattgtgtttcatatatgtacttgtttctgtgtaagaaatcgattatgtttcttcctatgtatgttcgtatgcgtgtgtgagtgcatttataacaagcatcctcaatgcttaggagggttctcaaccagccaatttctcacattacctcaactgagaacagatagctgcagcaataaaagaatatactcagatctcggtgggtatcttagagacatccctgatgaaatctcacaatgactctgggatagctaccctgggctcccttttcagaagggccaccgtccatcagcatggtgggggatcactatggccattgactaacagagacagcagcaatctcatattctgcttttggaattctcttgacatgctaattccatattatcaaatatatcacgggtatcatttagacttttctgtacaatgtgttccagtcaccactccgacttttgctttcaattatttcccaaagatttgaaataacagataaacttaattttcatttatatgcctttctctactgcctacttccttttatttgtcaaatgtatgataactctttaaaattaaaaaaatacatattttacaagtaaaatctgcatgaatcaaccttgagttttataattaggtgcaatcatgatttaatgtgtttagattctagacaacttctcaatcatcctaaagagatacacattagccttatacggagacagaaacagagaaagaaggcctgcaaatctcttacgcatttatttttataaacatatattataaacttactatgtatctgaggcaccgtggtggggtgtatagtctatgacctcaaggctaccatgttgtcatggaagaggcagactggcagagcaatgatgcaattacaaataagagctgatgtgcaaaaggctgatggagatctggagggagcagtgcggaaagtgacttgctgggcagtaggaaagatttcactctatttttgtagcacaaacacaaaatcaccccaattcctggggtaaaaattatttatgttgcattttaggtaaaccaatagtattcttaacagtctttaatttctgttttcttctttaaactctactgcatccaagcctacagaggactcaatagtagaagcaataatatcatcattttaggatagtgagacgtgattggtgataggagtaatctaattagacaagcaaaacactctggagtcatttaatatttcagtgtaggagctatcagtcctataaactttaatcatcaggaaaaaaattattgctttgctgcacactttgtgataatagccatgagtcattaaagtaaggttcaattatgttcattatgttctatttaaaacggaaagaaacataccatatttagaaatctttctgtccaatgagttatctttaaatactacctaaataggtgaccgtttcaaaatttcattcatcaaatatgtcatttgttcataatgttggaaaaataaaatgccaacatactaaaaaaaaatcacattacatttaaatagttgatagtggtctctaaagttttttcctaatttctcagcataattccataaggcagacattgtttccattgtgccactgaagcaactgacacagtcacttaaccttagtcatgtaagtcacccagttcttttaactcctataaatgctctttcatttatccatctattaattcaatagactcatttattgagcattcatatgacccacgtttcataaaataaaatggcagacagtttaggtaatcctgtaaatctacaattataacatgattcaaaatttttctggaggtggattttctagtaacaagtgattcctagaggactttaactcactttacaatgaaatactacctgccatttaattacaccagggaatacttcgggtattttgagagatagatggattaagtcggtaccctatccgtgagtgacacaggtccacgaatgggaagaactccagctttctctgtatgttcctcacataaccagatactttaaatgactttgtaattttttgttcatctctcagttcagcaggtgaaaaaacaaaacaaaacaaaaaaatcaaatcagtcagagctaacgcatcctgtggagaaacaaaaggactgactctgtttctttcttcaatgggctgtttgatattgtgtagatttagtgtctgtgctcttcttaaaaaattccacttaacgacccaaaaagaagagcattactttcacaatttaataaatggaaaactgtggaatagaaaggttaagtgagctgattatgctcagacaagtccttagcaacatagcatttctctgccagagattacatgagaagctgcctttccatgattcccattgtttatgcagtcattctgtgttgtcaaggcactttttgatttttgtcttctgtttcctaattctgccaagttattctttttttaaaaaaggcacagcacacgtggcaatctaaaatccagagtttttcttggcatcactgattatgcttttggatgaatgaacacaccgacttggatgaggaaaatgcaaaagaaaaatagtaaaatagtaaaataagagaagtattatgttcaatatttgaaataattacagtcactcaggaaaaaaataagagcatcttaaaatccattagctaacaggactaggagggcaaagaacagcatgaaacagctattggaatttataccttttttttaaactcacagactaaaccaagataccattcatagtttaaggctagggggatagcaaattggcctcacattagaaagaattgtccaggctttgaattgatagcccaaagacaaaacaaatctggctgtgtgtctaaagtcagccttgattttgatgtcagttaatttgcttgtgactttgaaaactttaaattgttgccatctttaacccttgagaaatgagtcatctgtttctgtaaagtagaaaaggacaaaatcagcaagaaagaaaattttattttcaaagttcaaagagaatgcaataagtagtggagatgatttaccagtaactgtgctattgtttttctcaagagtttgaaatactctcttaaggaacacaaaaagcaaacaattttaagaataattgtagaagtcaggttttctttctctcaaatttttgcaacaagagaaagccgaggaatttgcttggcataactataaaggaaagcatagagcagctattgcaattttttttaaagacatgattagaccaccttggtatcttcaatacagtttccaaattattttccttgtaataaataattcatgatcagtattattatcctaatttttcaggtgcataaactgaggcccataggtttttatatcgctcaacaaagtgactggtttccaaggtgaaggtctaggatctgagccctactctgtgactctgtgaactccatcctctgacctctactctagctcacttcttccagtgaatcttcatactttgattgcctgcattgtactttcttttcctatacaaataaagatggcttgcctgtcttactcaggtcatggagttgttataaatatcaaatatcacaatgtatgtaaacatggtttaggaatttaatagtgaagagtttttattttaatgcatatagaaagcatgattgattagtctgaaactggttgtttggatttagagcagctattttagtggtaatctgaaaactacctgccaaacacggtggctcatacctgtaatcctacaattttgggagatcaaggcaggaggattacttgagcccaggagttcaagaccagcctgtgcaacacagtgagaccctggtctttacaaaaaacaattagctgggcatggtgctgtgtgtctgtagtcccagctactcaggaagctgaggcaagaggatcacttgagcctaggaatttgaggctgcaatcagccatgatagcaccattgtactctagcctgggcaaggagcaagaccttgtctctaaaataaaaaataaaaagaaaattactaacctttgcttcctgcccctaccaccacttactaccctcccatagtcaagctggagaattccagagatttatagtaaatcttccccatattcccattcttccaggacacactcagctaccacacctacccatactttacctggaagaaggatgagtgtgaaagcaccattcatgcttctgattgcattttaacctaacactcatgatatacagagtttgaccagtcaaagatgcaaatcattcccaaatgtgctgggttcctgtgtttaatgagaattataggacttgctatccaccttgaggtctgctggagataaaccaaagaaaaatatgagcaacagctctttttcatgaataggttgaaaacttgcccaataattcttagcagttctaggacaagacccaattttctacttgcagccttgtttgaggtcccaggttgaaaaaattaaaagtcagatactgaagcaccccaccaccttgattcacaaatgcagtttctatgtgttacaaccagaatcaggatgcaagaaacttcaggacaagaaaacttgactttgtccaaagtgtgattttgtcagagattaatgcttctgttcccaataccaagtaagaaattgattggttcagatccacagaatgagaatgaggaggcactgatgctgctgagaactcagtgcattgcatgtcacacctaaagcacacatttatttttaaagatctcaactcaatcattctgtttgccaggcactgggctgtgagctttctatgaagtattttaattaatccttaacaaacactttttatgtgggggctatcattttacacatgaggaaacagctagtggatccaaagctagaacacaccccaacactgggctatttgcaaaaagttagcaaaaagtacgtatctggggacaactgcttccttctcccctatgcctttgtgatcagaaggagtatttctatgagaggtggtcctgtgagtgtatgatgaacacttaaaaacaaactataaagctccttttagtgtgttcagaagcgaaaatgttttctatgtgttactagactccaattcacagaattttgtttttttttttttttttttttttttgagacggagtcccgaactgtcacctgagctggagtgcagtggcgcaatctcggctcactacaacctccgcctcccaggttcaagtgattctcccgcctcagcctcctaagtagctgggattacaggcgcccactaccatgcttggctaattttttgtattttttgtatagacagggtttcactatgttggccaggctggtctcgaatgcctgacctcgtgatccactggccttggcctctcaaagtgctgggattacaggtatgagccactattcctggctcacagaaaatcttagaagggagatatatgagaaaagagaagggatcattgtctcctattacacattggaagctataacattctctagcatttttataacataactgaaagcaaagcttagaagtcagtggtgggagatgagttcgctgctacagtgtaggtacttcagccatcacagatttggatgggacttgtctggttctctgagtgccagcttccttggtcaaggctccatgaatggtctcccaggactccacacatacagaagaggtcaaccactgcagagggaagaccaggctttattccaaggtttatgagttgttgcaggcctcaagatgcttggagactaggaagggaagtggacatctgtgtcaatgccagaatgctagccagaccatgataaataccataagagggcactaggaaaatacaagcattcacagaaaggagtgtgcagagccatggtggagggaaatccaccacagagcagggagaggggcttcagctgtcactcagagttaaacctggaaaaatcagatgtctacgaagactgaactttatttagcgatgggagcagcaatagttggagaggaggaaaaaccattgcaggaaaaaggaacagctacaatcaaacacatcaagacggaatgtatgggacaagtgcagaggcccatttagctaagaagaatagtgaacgaataagaacagctaaacatttaaagagcagtgattctttttgcaagtaatttacatgtagcatcttatttggtctgctataaagtaggtgctatcagtataaggcaagaactatcactatagccactttacaaataggacctcggacttaccacctttctatgagaggaggtcctgtgagtgtatgatgaacacttaagtcaactggctaatctgcctagacagtaacagagcagatgcagcctgctcccaggtcccctttgttattatgacttccttttaagtacaatatgggagataaggttgtgaaggggagttgtggccagaagtcaagagtcctggaacattatcctaagataggatcgagaagcatagaaagccttgaaaatgttcaacaggagttagatatgatcagagctgagctttggaaagaccgaagctatccaggacattattttaaaaactgagttactagtttgcttgcttgcttaagcccccacttcaaggatgaagggaaaagtgctgatagttatttctgggtcagtgtcttctgagccagaatcctcaagtgcatttccccactccctctacactcattttagttgcctagaagagtcttacaaagttttctaattggctgaggatcctaaacccggaaacaataaatgaaagtctgagatttgggctcaatcaatgtcacaggaaagaaggcactggggcttatatttttacataaagatgctgcatttggggtagtcaaagctcacacattctgcagtcacccccattacaggaaatggtgggccttggatatggctgactgtaatattaactttatgaggaaacagactctgctctgaagacttatgacctgagggaaagatggacaaacagaagaccaaggcctcatggtgggctcctctgatagcctcctgtgctgctttcctcctcagaaatactgaggttggacgtgaggcactcttcagcaaaaggacatttctgcctttccagcactaaaatggccatgagtaaaattgatatgtcaccgtctcaccaaagtgaaaaactgaagcggactcctaaggccacgcatggagcaaaactgtttatgcaagaagcatttactgagcacctgctgtgtgctctgcttgattgacttggatgagaaccatgaacaatatgaacaagtgccctgccctcaagagtcttacattctagggcaggaggaaagacacctgtaacaatcaagagataataaaatgtctgtgaaagtaaaatcagatcaggtcataaagtaacagagcagtaggctactccacagagcttgccaaggaaggcctccctgaagaggtgatgtgtgagcagacactggagtgacgagaagaagccagcgtgcaaagggccaggcaagcacatctgatggagagagttcagcaagtataaaagcctcaaggcagggaatgtgtttcccatgttcaaggaaaataaggaacaggagcctggagcgtagacagggatggcatgtacaacagaaaatggaagtaaagggggccccactggccagatcatctagggccgtatttataaatttgggttttattgtaaatataagaagccccttgagggttataaacagtgatgcgactagtgatattaatagtattaaaataggactgtgcatgttgagtgcagaatgaatagcacagaagcaaatgtggagacagagagaacactcaattgggtactgcagaagtttaggtgaaaaagcctggtggttttgactaaaggtggcaatggggaggtagaggaatgagcagattcaagatacatttttggagacaaagacaacaagacttcctagttgactgaaagggaggtgggaatggagaaagagagagtgattaaagataattactaggtcttagtcttaagcttaaacaactgattggaaagtgtcatttgctgagtcagggaaaagtggggaggaaaaggagggtcgagaagaatccagaggtccaactgagttgccttatgtttgagatgcttactggtaaaaagacagatatgtgaattaggtagttggatacataagtcaggagtctaggacaggaaaggcacagtggctcattcctgtaagcccagcactttggaaggccaaggcaggaggtttgctcgaggccaggagttcaagaaaagcctgggcaatatagtgagaccctgtctctacaaaaaagatagaaaaaaaattagttgggtgcagtgacaggcatctgtagtcccagctatttgagagactgaggtaggaggataacttgagcccaggcatttgagattgcaataagctaggatggtgccactgcactccagcctgggcaacaaagcaagaccctgtctctaaaaaaatgaaaaagtaaaaaagaaaaaagaaaaagaaaagattctaggagacagttgagatcgctgagggttagagacataaatttgggaatcgtaaaaatttggatgcatttgaagccatagaaccagctgtgatcactcagggagagattaaacatagagaaacaaccagggcccaagagtaaacccagggagttcattcagcacctgtaggttcgtagaaggtgaacagtcagcaaggaccaagaaagtagaaggaaaaccaaaagggtacaagaacacagaagccaagaaaagaaagtgttgtttcaggaaggaggacatggtcaacaggatagagagagtgattaaagccaattactaggtgacatgttgcctaagataaaggcagttttgagctccttcaaaggtatctgtttcctttgttttgatattgtttccaaaaactacatatcaggtttgatacgataccagaatgcagttaaaatgtaatcagtttatttactcaagatgtgtgggattatagaaacattttatcaattaccatttccatttataacttgtgcatcagttatagatcctattgtaagattgatatgcagccaaactgtgctatatactttcagtgttcactgtgtaagatactaaagggcttattacactgtagcccagcctaaagacacatgctaattatcttccatcatggtgcctgcactggctgtacttctactgaattgtaagctctatcatggtgggcacgtgcctgatatgttcaatcaaacaatagtttaatgtttagtatgtttgtttgtttgttttgagacagagtctcactctgtggcccagattggagtgcagtggcacaatatcgactacctacaacctccacctcccgggttcaagcaattctcctgcttcagccttccaagtaactgggattacaggcatgcaccaccatgcccagctaatttttttgtgcattttaaatagagacggggtttcaccatgttggccaggctggtctcgaactcctgacctcaagtgatccttccgcctcggcccccaaagtgctgggattccaggtgtgagccaccaggcagattttttaaactttggctgataaagtgatttaatcattaatcagtcagtgttaagagattagccctcccattggacatgctgaaaacaggcagctggcgactaagtgaagtctcacaggcagaacatctccactaaatcacagtctagctccaaggaccccttgttattcataatatttactgcatatttagtccccacaagctcatgattaattactgcacagattcggatggacaacatgtgacctacagtttccctctgcacagtaattgtagagggaaatgtaataatacccagtcagtctaaaaagcctattagtccaattctccacaaaattccatgaaaatataacatcacagcctgttgacttccaagaaatagtttaccaagagttgccataaacattagtacattttagttttagtgatagggtacttggcaaatatacataaaatcatacacacatgaggcactttgataggcactgaaaaataaaagacatacttcctgatcttaaagagtcctaaaatctagttgggtagatgcttttcataacatgaaaagctaactaatagttagacattgaaatgagaaaaacgaaatgttatgaggttctatagaattgacagctattgatgtgggccaggtatgagatggatatgaatcttcagtggaatctctgataaacacagaaagtgggccgggcgcggtggctcacacctgtcatcccagcactttgggaagccgaggcaggcggatcacgaggtcagatcgagaccatcatggttaacacagtgaaaccctgtctctctctactaaaaatacaaaaaattagccgggcctggtggcgggtgcctgtagtctcagctactcgggaggctgaggcaggagaatggcgtgaacccgggaggcggagattgcagtgagctgagatggcgccactgcactccagcctgggcaacagagcgagactccatctcaaaaaaaaccaaaaaaacaaaacaacaacaacaacaaaaaacacagaaagtgaaggataaacagagtaacataaagtatgtgtgtgttttgttcttcctcaaaataaaaaattatcagtcctagactattttatgtgagaaacccaccttgacacctgtttctcattgtatggcaactacaaagaagtataatgctgaacagtgcatctctagagaacagcttccatgtgggacagtgtttccaaacagagaatacattttctatccctgtaattactcttctattataataagatgtcctttgacacacagaatggcgttgtagaggagcactagatcaagagtcaaagggtttcagaactcctgactctgctgtgaatttgatgtgtgtccttgccatggataggacagcagcgcacgggagtcaagagctctccagacatacctgtcattcactatttgtgtgattgtaggcaaggcatttcagctttctcagactttatttcatcatctataaattgggaagaacagtgtctccggaaactccaatgcatgttagtaagtgaaggaagccaatccaaaaaggctacctactgtatgattccaactacataacattctggataaaggcaaaaatatggagacaataaaatgattagtggttgtcaggggttagaggagagggatggatgaatcggcagagcacagaggatttttaaggcaatgaaactacctcgtatgattctataacggtggacacacgtcagtgtaaatttgcccaaactatagaatgtacaacaccaagagggaaccctaatgtaaaccatggaccttgggtgataatgatgcctctatgtaggttcattaattgaaaaaagtgtacctctctggtggagtatgttgctaatgggggagattatgtacatatacggatacggggtataggagaagtctttatagcttctcctgaattttatcgtgatcttaaaattgctctaaaaaataaaatacatttaaaacaatcataaaagaacagtacttcggccatagagtagtaataattaaatgcgataaatatgtaaaggacagcacagagcttcctaaatagtcaatgttcaataaatgccagctattactctgatcctgtttcttagcatacagcagatcaaaagctgctgactggaattaaaggtcagagctgctagaagttatactgatggtggccagatgttacaggaggatacagaagaatgctaggaaggaagcatcagaactcaggaaacatttcttccaaggctatacagggagggagcaaataatggtctctttgttttttgttttagacactgggtctggctctgtcactggggctggagtgcagtggcatgattatgactcactgcaacctccacctcctgggctctaacaatcctcccacctcagcctcccaagtagctgggactacaggtgcaaaccactatgctgagctaatttttaaaatttttctgtagagacagggtcttgctttgttgcccaggctagtctcaaattcctggcatcaaacaatcctcctgccccccaaagtgctggaattacagatgtgagccattcctggcctgctctctatcttaacagatcaggaagcatcagtaccgtgcagagtcacaacctatagcattgtgatgtaagaaaagcaggaacatttgcctaagaagggctgggttggaattcttgctctctgttggtcccgtgctaattctgggtccttgactaagtccattcacgtccctgaactggatccctgccatcaccatgcgcaataggcacagctcagctactgtccgctctacctcagcagacaggactaggacctttctggcccagcccatcttgttgtaaataacaaagcatgccccataggactccaaagaataaaaaatcatactccatttgtcacagctgtgataatcactcacttttgctctaaaaatggagacagtatgcacctcaccaggcaactgagagaattgaatgaagtcatggcttacaaagcatttgggacacacaacccccagctccgtcaatgttagtgtggctatgaatgttttctaaatgataattcacacgctcaggtgccagcatagagctatacttgctactattctgacctgggtattgtgcctccgttttgaaaattgagtattcatcccgttcctgagccttagtttttccaggtcttatgaactggcttcttcctaacccggcatctcacgctttttttttttttttttttgagacagagtctcgctctgtcaccaggctggagtgcagtgatgtgatctcggctcagtgcaacctccgccttgcgggttccagtgattctcctgcctcagcctcccgagtagctgggattacaggcacatgctaccataccgggttaatttttcggtttttgtttgtttgtttgtttgtttgttttagtagagacagggtttcaccatgttggccaggctggtctcaaactcctgacctcaggtgatccacccgcctcagcctcccaaacgtttttctttttttttttttcttaaagaaagaatggaaaaatgcatacataccgtgctctggtccacatttatttgctttcattttggtaatcctctgggtcctgctgtgtgcttgctagtcccttatccagagcctgaagcccagactcagaacacagtctgctggctgggttcttctcctcattagagatcgcccaaataccactctcattgcttggacatacaagtagaccatgtcccacctctcaatccttgaacttcgttcatgtggtaagataccctattacactatttcttctgaaaatttccattactaattgtttccccgcataaatgattgcagtatgatttggttgcgtgcctatctatggcactcaattcccactatcagcacctgcaaaaggctcagctcagtcaccacgtgctccatctgaataggcaggactagaacctttctggcctggcccatactattgcaaataactaaacaggccctgtagatacccaaagtacaataaatcatgctctgtctcgcagctgacatttcccctggaattcaacagtctagatatatcaagtagatgggtgggtcaggtctacaagaagtctatctacatacacatggtattgaaaagtctcctgtgcggaaaagtcactctcagagaaaaaggagtcaaactgggtcaagtacaaaacttatactatagagaagagacatgcttctatgagttcaaatctgttttccagtctaggcctcccacatattcccacctgaattctagtaagagagtaagagaaagaggctctatgtagtaaaacagtggaatgcactgtagggccacatgggaaacatttggaaaagtaaacagtaaggagagaggggtattccctctacttctgtaccgccttggcacacgaaggacatcagagaacctggcatctcttaggcattcaaagcacattggtggcattatcgtcaggaaagagacagcagcagctaaaggaagtgacagcaacaccctgttgggcagatggacagaacaggagtcgatgggagtcagaactaccctctgagagtagctcacctgtggatcctggaagcaaaggcgaggcattttcatgcaactttgcacccatcaacaacagagaaaggaagcttataccaggaaaagtagagaaataatgaatgtcatttattcagtgactggattattattgcactcagtgataataaacatcctgcctaattgatcagcagaaaaaaaaatgtattgagtgaagtagtctagggatcatgactccacaattattcattgagctcaagagccaataaaaacatgattacctagccactctgttgacgacagcagaaaaattatattcatgtattcatctattcatcatttaaaaataacctgtaagtacctaaccacacatcaggttggtatgacaaacaatgtggaaacagatgattaagttattctccaaaggcatctcataggtaatgatatgcaggttgagcatccctaatttgaaattcccaaatcggaaatgctccaaaatccaaaactttttgagtgctgacatgaggacacaagtagaaggttccactttatttcctgtttcacacataagtacttaacacaaactttgtttcataaggatgtaacacaaacttcatttccatttatttaaaatattgtataaaattattttctggctatgtgggtaaggtgtatacaaaacatcaacaaattttgtgtttggatttaggccccatcccccaagaaatctcattatgaacgtgcaaacattccaaaatccaaaaaaaaaccccgaattcaaaacacttttggtctgaagcattttggataacagataggcaacctgtacaatagaatttcaggttccatgacagaaatatatttgaagagctataaaagcttgaattaatctactgaggaaaacagcagttcatagaagtttgactgaggaagtaacctttgaattggacattcttaagcagaatgaaggcaaaagaaaatattatggaagtggacttttgcaggaggtaatattctaaagtatgtccacaacagaaaaatcaggtaaagtttattcttgtacattccttaaatcatccatgaaatatacatgaatttgtgtgtataaccttatagcatttttaacattaaactttgagaaccactagtcaggtctaaggacatcacaagaaactgtccacatggtctacgtataaagatcattctgcttttaagataacttcttaacaagaaataaacagaaatttctattgtttctatttgtctgaagggtttactctattttattttaatatgaaatctctatgaccacctaacaacagaggttcaaaattcatgaagcaaaaactgatagaactgaaaagagaaatagaaaaatccaaagtgatgactggagatttcaatttcaaccacaatttctctgcagttaatagaacaaataaaaaataggtaaggatatagaagacatgaacaacagtaccaatcaagtggatctaatgtctatagaatattctactcaacaagaacagaatatacatttttttcaagtgcttttagaactttcaccaaattagaccgtattctgagctataaaacaaactttaacaaatcatgaaaactaaaaatcatactaattatgtttcctgcctgaaagatcaaaatagagctcaattacagaacaatagctggaaggtcctcaaatgttgtgaaatttaaaaacatgtttctaaataaccataagccaaagaagaagtaatgaaaaaattagaaaatattttgaattaaataaacacaaaaccacaacatattaagtattgtggtatgcattcaagacacagcttaaatgaaaattaataccaccaaatgcctaaatttttaaaagagcatctaagtttccatcttaataaactagagaaagaaaaacaaattaaacccaaaacaaacagaaggaaagaaataacgaagttaactgaagatatcagtaaaattgaaagcaagaaaacaaacaaaaccaacgggaaaatcaaaatctggttctgagaaacaaatgaataaaactgacaaatttctagccagattgaccaagataaacagagagaagttacaaattatcaatatcagggaaaaaatgggaaacatcacaaagacagcatcaatatttaaggaataataaaggaatgtcacaaactagatacttaaccacactctgactcactcaaaaacattttatgctcactcaaaaacctgcttatgaaagtttatagaggatttattcataatttcccaaatctgaaaacaatccaaatatccttcacctggcaaacagataaacaaatactggtacattcataaagtaacatagtttcacattttgattaagtccaatttatcaactgatgcaaaagaccacaagaaacaacatctaagattgttttttttctagcatttttacctgattgctatggctcttcttcaaacttcttttccctcaaattacatttcctaaccatatatatatatattttttttttttttttttgagacggagttttgctcttgttgccaggctggactgcaatggtgtgatctcggctcaccacaacctccgcctcccaggttcaaacaattctcctgcctcagcctcccaagtagctgggattacaggcatgcaccactacacccggctaattttttttttatttttagtagagacggggtttctccatgttggtcaggctggtctcgaactcccaaactcaggtgatccacctacctcggcctcccaaagtgctgagattacaggcgtgagccaccgcgcccggccatctaacataattcttatccagtactagcatatggctatgacaatggattcaatgttggataagacagaaatgtaagcagatgatgggtcttgaggtcttttgcgtcaactgttcatttgccaagtaacatgattcactcatattattctcatagaaacttaagctcccttaataacaaatcctacatacttctccagaatgccaaacgagaatagattttctagtttagaaatgagaaaattgtgacaatttttgaagtactgaaaaggttataatcagaggaaaggacccagtataaacctctgtgatttttttttaaagaaggcaaaaaaggaaaggcagatgttgtgaaggagtgaaaagagaaaaagggagagtgtagtgttacataaaatctcaatttaggctgaacatccaccaagattctactggaaatcaagcattttactctcatttcatttccctaggaatcctgtgaagtaggtaatagctctccatttatagatgaggaaaattcagtttagagtgataaatgacttattcaatgctacattgctagttaagtgaaggaggtaagatttacactaagaattagagattatacactttttttcaagtgccacttttgggagaaaaaatgattaaatatcagtataaaagtattattttgaggaaagaaggctccttaaaaaggtactccagttgtttggaataattgcagtctcgtttcagtctcagctctatatgcagtacagctcaataaagctctaatatgcagtacagctcaataaaggtggaatgccaaagttctcatcttttagcctcatggctgttgtcccacttaagggacacagaatggctttataaagaaattaacattaaccaagtatatactgccacttatctctcttgcctcatttctcaataaagaaacctgaaagttactttctatggctagcttcaccttgaagcatgtttgttttatctaataaaggaactgtttagcttaattccattactgattttggtgtcagatcacacgatataagctaacaaagatctacttcactgattgcattgcaacattatctgaaaataaaagtggggtaggaagggaaggagaagggagagatgaagagaggatggtaaatgggtacaaacataaaactaaatagaaggaataagttgtagtgtcagcagagtagggtaatgatagttaaaaataatttactgtatatttcaaaatatctagaagatatttaatgttcccaacacaaagaaatgataaatgttttgggagatggatatccaaattaccataacttgatcattacacattgtatgcatgccatcaaaataccacaggtaccccataaatatatacaattattatgtgtcaataatgaaaaaaagttagagttttatataacttctattatagtccttttcttttatcctcacacacacacacacacacacacacacaaaaagagacagaccttaaacaattatacagaaagttgtctacaaggatgttaagagtaataaccaatctactttttaaatagttgagtgggttttcagaaaaaaaagtattcaataaacaggaaatatgtgcaagaataaaaagagaaccttaattataattatgtatttcttttcagcagagtgttaaactctggtaatagaaaaaatatatttttttcttttaatccatggacattttatttacaaaatcttatgatcataggtttattaatgatcctcagacgttttactacaaaaaatgcttgagattataaaccacgacagaaacaaataaaaccacctcatgatagtcttggaacactaagaaaaagtcctaagactaatattaattgacttctatggtcaatggttctctgacattattgtgtgaccttaggtagtaaattagccactccacaaatttgtttacttatttaggaagagaagtagtaagaattcctttcctattaccacctcaaataattattgccaaattatatgaggaaatacacaccaaaatactttgaaggcttcgaaattcagcagaacttcaaactatcaaccaaacaatatacgagtgctccagttcctctacattctcaccaacatttggtgttgtcacttttgaatttttttttgagacagggtctcactctgttgctcaggctggtgttcagtggtgcagtcatagctcactgtggtctcaaattcctgggctcaagcgatcctcccacctcagcctcccaagtaactgggactccagacacatgccaccacacctagctaattttatttatttgtttatttttttgtacagacaagagtctcgctacattgcccaggctgaactatttttattttactgttctgataggtaggtatgtagtgatatatcattgtgattttaattgttatttccctaggtgttggacatctttttatgtgcttatttgctatctgtataactttggtaaaatgtttatttatatctttgcccttggtctaattgtttgcattcttactgttgtgttagaagttctatagtctatattctagatactagtcctttgttagatatggggtttaccattattttcttccggtctctagcttggcttttcatccttacttaacaaagtctttcacagggcaaaaggttttaattttgataaagtccaatttattcactttttcttttataaatcatgctttcggtatcaagtcttagagctatttgcctaggactagattctgaatattttttgctttttctttacactttttataaagttttacattttacatttaagtccatgctccattttgagttaatatatttaaagtttgtacaaggtgtgagacttgaggttcatttattttagtctatggacatttaatcgctctagtatcatttgttgaaaggtgatgtttccttcattgaattgcttttgaatctttgtccaaaaaatcaattggtcaggctgggcgcggtggctcacgtctgtaatcccagcactttgggaggccaaggcgggcggatcacaaggtcaggagatcgagcccacggtgaaaccccgtctctactaaaaatacaaaaatttagccgggcgcggtggtgggcacctgtagtcccagctactcgggaggctgaggcaggagaatggcgtgaacctgggaggcggagcttgcagtgagccgagatggcgccactgcactccagcctgggcgacagagcagactccgtctcaaaaaaaaaaatcaactggtcctatctgtatgggtatacttccacaccatctattgtgttccaaactatctattctgattgctagtggatttatgtgtctgttccactgataatcttgatactatagtgacatagtaagtcttgaaatgaggcagatttatttttatcacattatttttcttttcaaaattgttttagctattttagttcctttgaattttcatatgaattttaaaataatctcaatatttataaaaattttgctcatattttgataagaattatgttaaatctgtatgtcagtttgtgaagaactgagactttactatgtcgagttttccaatcagtaaaaattgcatttatgtccattaatttacattttgtgtgcttcctttgattagtactgtagttttcagcacacaagctctgtacattttgtaagatttacacctaaatatttactttaaaatgtttctgattattgtaaatggtgttataatttaaattttgattttcatgtgttcattgctatgataaatacaacagatttttgtatgtttatcttctatcttatgaatttgctgaacttatttatcagttctgtggatgtttttgtagatttttttcattttctatatagacaattattccatctgaaaatggtgactgttttttttccttcctggtttgtatgccttcccccagccccatcttattgcattagcaataccttccagcactatgttgaataaaagtggtggaacctgtttctaattgaagggaaaaagctttcaggttctagccattaagtgtaatgttagctgtagttttcttgcagaggggatagatgttctttatcacgttgtgaaaattctccgctattgccattttttttttttgcgacggagtcttgctctgtcgccaggctggagtgcagtggtgcgatcttggctcactgcaacctccgcctcctgggtttatgccattctcctgcctcagcctcccaagtagctgggactacaggtgcacgccaccacattcagctaatttttgtatttttggtagagatgggatttcaccatgttggccaggatggtctcgatctcttgaccttgtgatccaccctccttagcctcccaaagggagggattacaggagtgagccaccgtgcccggcctccactattgttatttttatgagaatttttttatcataaatgagtatttaatttttttaaatgctttttctgaattagttgatatgatcatgtgagcctttttttctttagcctgttaatacaattaaacacattgactgattttcaaacaatgaatcatccttgcatttctagaagaaatcccactttgattatgatgtataactctttatatgttgctgaattctatgtgctaatattttgttaaagacatttttatttatatttaggagatacatcgctctttagtttccttttttgaactgcctttggttttggttcaaggtaatactacttcataaaatgatttgagaggtatcttctactcttttgtctggaagagattgtgaattggtgttaatttttctttaagcttttggttgaattctctggtgaaatcatctggacctagatatttctttttggggagttttagattataaatttaagttccttaatagtcatagggccattcaaattctcgatttcatgttggtttacttgtaatttgtttggaattggcctgcttcatctaagttgtcaaattcatgtgtatagagttgttcatatgcgggcaggggtgcctcactaccatctaacagagatgtaaattcaggctccttcctgggctgcctctgttatcacccaggtgagggtgtttggtctcaacagagcctcacaaaggtcaaagtctacgttttctactcaggctttgctaacatgagcagaggcggggccaaacttctttctgtggtgtttggctggaatagaaaggttattatctaaaagctccatatcttgccagcctggccctttcctgatcatttggctagagaaaacaggtgtgtgtgtgtgtgtgtgtgtgtgtgtgtgtgtgtgtgtgtgtgtgttttgctttgattttgatttggcttggttttattttctgtctgcacgtgtgtgtgtgtgtgtgtgtgtgtgtgtgtgtgtttggtttgctttgattttgatttggcttggttttattttctgtctgcacctgtccgcatttccaggattctagttctttagcattaagaactcactgccatgtggtttttcaggtcccaaaggccccagctcaaatgtttcttttctccacttttcagagtcctttatgtatattttatgtataatgttcagaatttttacttagtgggatgaaaaggcaaagaatgcctacttcagcttctagaaacagaagtcatccaggatttagttttaaatgaattggtcaagatgaatttctggtacataaaataggcctagtcaaaacatgaataatttatccatgaaacaaattccttttcgtgacatttttccttggtgggccaatctgctattccccatcagaaaagagcccaggtgagagaagaagaaaatagaagaaaacagaaaatcaggaggactttctctttctcactcctcacttcattcctgcctcactcccaaggcaagttcagagccccacagtaccaagagttcaggaaaatccaagggctgaattcaacatccatctagccagtagagatattttaaaaatcacacatattatactgacttgaaaaaatattttcagcacctactttttaagtactcttatgctaaacacaatggagaaaattaaggtacaaaggcatagcctctttcagaaaatccataaaacctgtatccaaagaactataataatgggcaggttctgaagaatgacatagaatgggccacacatctctaggataggatttaaaatgtcatttaaatataacacaaatgtttgtattgggaactctaaattgtccttgtctacagccttcttccttccctttcttacaacctataagatcagacttaagtaaactcctaagctaattttgaatcatttgtcctccctaagcccataatcacatggctaagccaagaattattcaaacctaattctcccgcaagacctcatccattgctcactgctcctgaagatggtcttgagtatccccctggatctgggcctcagactgtctttgccactctcctgtgttaccacatggagttggtccccgccatgtttggtcaggtctcttagaatgataacttctaacatcatggatcctgaaaattagctaatgtgatttccaactactgtgtctcatctagctgatattatcaatcaattcatcctgcctgaatttataacaccacatttggatatagtgtttagttgcttaacatatgttcaataagcataaattaaatacatatagacaaatggtctagagcagtcttcatcatgcttctccggaaggatctagagtacttatacaatttgagaagattgagtttcataccaagtagggacagggtctggaaacaggcagtacacaaacacttgaatgtatgttaagactgagacttctgctacagaaagtcagaggaaagaatgtgactttcaggtgagatcagcaaagaaggattccctctgccacaaaataacaccttctttcccagaaactcagatttcctttgatataattcactattaattttcactctaggagatgaagcatctgaatgaatgttcctggaatatgcttggaacatgggaataaatcatgctagttgatatggaagacaaacacaacactccagcaatactctcttaggaattccctcatcaccatttaaattgttgattttctgctcttctgtagaaatctctagttctggatgaacataagcactgtctatattcgttagacagcacaatacatattagtctttaatttatttcacctacaccaaacctaaattttttcttcttctaactttatgtcctaattttctttacttaattttgtctacatttttgtcatcattttctcttagatttttgttcagctttccttgaaacccaataaaagcaaaaattatattgagaaaagacaaaatttcacatcccatattctacagcttgctacctctgggcaccaatggacattcaactgaaatataattttttaaagaattttatcagtataatagactcttggacttgaattatgaagcctaacaactggtgctaaatcagatgaaattgtgaagaaatgtctgcagtgtagctctaactaaaagctatattctaacaagtcggcgatggagcctccaactttctcatgcctctggatggaatttattccctaaactcagtaaagccactgactttcagaaaatgaataatctaaaaaaactgcaaaggcaaggcttttgttctttaaaaaaagaaatgaagctaacttctgcttatggcaatggagatcagtttattttgcaccaatttcctactgaaaataactataaaggctgaacaaaatgtccaaaacccatctgtttgaagtcatcagagagccatcaaggtaaagaggggcttcagggcaaataatctgacagaggcaagccaagagatgttcaccccccaaagcagttactaaaggcttggaggttgacaggagtatttaaaagtcgcactgagaaggacaacacaaatttgagtttagtgccttccaggaatgaaaaatccttggataaagacttaggatatcactctgcaatctacagggcttcaccctgcaagtgagtgtaaacagaaaatagaacaagccttataaaggtttaagaaaagttttaggtcagctcaagtcctaaaggattaaggtgattggcatctcacttagctgcctggtagaagcaagttgaagtcccacctggagaaaaacattcactgaagcctcaaaatgccttgcaagttttcatctaaaatgtatgacactcaatgaaaaattaatagcatattaaatagatttgaccagcggggcgtggtagctcacgcctgtaatgccagcactttggaaagctcaggtgggcggatcacctgaggtcaggagttcgagaccagcctggccaatgtggtgaaaccccgtctctactaaaaatacaaaaattagctgggcatggtggcgggcacctgtaatcccagctactcaggaagctgaggcagaagaatcactcgaacccgggaggcagagggtgcagtgagccgagatcgcgccattgcactccagcctgggtgaaaagagcaagactccatctaaaataaataaataaataaataaataaagatttgaccagctaacaagagggaaagaaaaccagacagtgcaaaattatccatgagaaatgcagttgttgtatttatctgataggacttaagataacagtgattaaaatgtttaaaagattaaataaggcaatacaattcagtgaagaacaaaaaattataaaaacaaagaaaatataaattctagaactgaaattaagaactttacagatagatgtaacaataagacatacaggactattgaaaaaatagtgaattggaagataggtcagaaataaatattgagaacaaaagagggagaaaaaattacagaaaataaagaaaagagcatgcaaaatttatgggacaggtacaatgaaaagatctaatacacatgtaactgaaatttcagtaagacaatgaaaagaaaaatggggcacaagcaatatttgaaaagatagttgctgaggatttttccaaactgatcaaatactttattcaagaaatgctatgagccttaagaagaaagaatacaaagaaaaccacatagctagatgcatcatagttaaatttctgaaaaccaaagtcaaagagaaatcttaaaaaaagaaagagatagagaaaaaagtgtattaacttcaaaggggggacaataagaatgacagctaatagctgacttcttaattgaaacaatggaagccagaagacagtagaaagatatctttagaaaggggtgggggcagaggtcaacctgtaattatgtatcagtattaagtgcaatacaaaaattcacaaaataaaagcattttcacacaaataagaactgaatgcaccagcagcagatgaacagagaaaatactaaaggatattcaagaagaagtaaatttgtactaaaaaatgtgtaaaaaaaaaccccatctgtttgaagtcatcagagagcatggagaaaaacattcatttaagcctcaaaatagcatattaaaaatatttgaccagctaacaagagggaaagaaaaaccagacagtgcacacaaatatccatgagaaatgcagttattgtatttatctgataggaactttaagataacagtgattaaaatatttaaaagattaaataaggtgatacaatttattgaagaacaaaaatttggcgatgcagaaaggaatgaagagtaactaaaaggagtaaatatgtggataaacacaagtgaatattgactataaaacaataatactaaagtcttatggattcttaagtatttagaaaattgtaacacatgagaacataaattagagtatgggtaaatgaggctaaagtgtattctaacttttgcattgagttggtgttggtaaaaatagtaatttatgttagacttgaatttcagggatgtattatatttcataagctagggtaagcactaatacaatggtaaaagaatgtgtatctgaccagctagtactggggagaaagggaaaaataaataatactgaatccatccaaaagaatgtaaaaaaaaaaaaaaaagaacaaataaggaatatgctgggttaattagaaaataaatgtaaagttctagattttaaacttaatatatcaataacattaaatgtaaatggactaaacactccaattaaataacaaacattttcaggctggatttaaaaaataattatatgacacaagagactcaccttaaatataagaatataaaaaagttgaaactaaaaatagaaaatatatataccataaaaatactaatcaaagtatctttttttttttttttttttttgagacggagtctcgctctgtcgcccaggctggagtgcagtggcgggatctcggctcactgcaagctccgcctcccgggttcacgccattctcctgcctcagcctcccaagtagctgggactacaggcgcccgccactacgcccggctaattttttgtatttttagtagagacggggtttcaccgttttagccgggatggtctcgatctcctgacctcgtgatccgcccgcctcggcctcccaaagtgctgggattacaggcgtgagccaccgcgcccggcctaatcaaagtatcttaatctcaaagtagatggtatagcaagaagcaccactagagataaagatcactttccataatgatagaacagtcaatccatgaggaagacacattttaaaacttgtgcacagttaataaatagtgtcagaatatacaaaggtaaattattagaagtaaaaggagatatataaaaattcaaaattgtagtgagagatttccatacatatacttattaactgatggaccaggcagaaaaaaacaatcagtaaagagataaaagaccaaaaaaaaaaaaaaagattgcaaacttgatctagttgaaatattcaaaacattactactgtataataatattcttcccaaatgcataatttaccaaaattaaacattatctatctatctatctatctatctgtctacctacctacctacctacctagtttcaaaggtttggaaatgtgaagtatattttccaacctaaatggagttaacctagaaatgggtaagaaaaataagtagaaaatatcatggacttggaacatagactatttttcaataattcatgagcaagagaagaaattacaagagaaatttaaaaatagtttgaaataataatgataatgtaacatctcaatacttgtaaggttcaggtaaagtcatgcttagaaagaaatttatatttaatatatacatgagacaaaggctgaaaaatcaacgattaagcactaaactcaaaaaatcaacaaagagcaaattaaatgcaaataaagtgaaaactagaaaacaataaaaaataagagtggaaatcaatataactgaagcaaacacataatagaagaataactaagaaaaaaggtggttctttgaaaaggctaatatagttgatgataacttgtcaataccctgatcataaaaaaggcagaaaaaaatccataatgaacaatgagattattacagctcacataggcattaaaaaggtaatagaatattttgaatagctgtatgccaatgcatttgaaaattgacataaaatgaacaaatttctgaaaaaacacaagctaactaaactgacacaagaaaacgtatcatttctaaaaatatgaatatttctatatttgtgaaagaaaatacatttataattttaaaacttttcataggaaaatctataacctcagtgttgttactggtaaattttaccaaacacatttggaaaaacaaaataccaatcttacgttaagttctttcaggaaacagaaaaaacgtggaacattttccagctgtttttttgaggttaccataatcttcatatcaaacctgacaaggactttacaagaaaaatcaaacaccaatcattgtcataaacccgtatgcaaaaatattacaaatttgtgctaaccaaatccattaatatagaaaaaagataatatacaaccaaacagcctagttcggtttattccaagaatggaaaattggcataacatgtaaaatcagttaatgtaattcaccatatgaagagaataaaaggaaacaatcatctcaagaaatgtaaaaaaaagaagtcatctgattatttatctgatttatttataataaaagcccttagcaaacaaagaataaaaaaaaaagactttattggccggtctcacgcctgtaatcccagcacttcgggaggccgaggcgggcggatcatgaagtcaagagatcaagaccatcccagccaacatggtgaaacctcatctgtactaaaaaaaatacaaaaattagctgggtgtggtggcatgcctatagtctcagctgcttgggaggctgaggttgcactgagctgagattgcgccactgcactccagcctggtgacagagtgagactgtctcaaaaaaaaaaggactttatttatttagtaaacagtatctagaaataacttccagcaaacattatacagaatggtaaaatattaaaaatttttcctctaaaatcaagaacaaagtaaaaaatgccagtgttacttacatttgacatgtacaagaggtcctagtcaatgcaataaggcaagaaaaagccaaaacatgtgaggattttaatggaatgaatgacagaagtctagtcctcttccctttcaaaataagctgtggcttccagaaaaaaaaaaaaaagagaaaggatgatgggaatgaaaacaacagcagatatctactatgtttctctagatgaaaataaatatagttactctgtttttagctgacaactagtcagtgtcaggatattgatgaacctcagtccgtcaatcagaaaaactactgctatcatcacacagaaggggttagaattcaagctgtactgcctgctagctgtaggacctttgacaggtcatatagcatgtctagcatttagatccttcatctgcaaaatgtgggtggcagaagtacttgcttcctctgcctgtatgaagattaaataaaattatacaatgtaataaccctaacatataaatacaaaataaacgttagatgaattttactgaaattattagtaacaactccaaagccttggttccttcagttaaggcgaccactgaagttaatctcatgtgaaaataaattataccccaaatttaacacaaacaactataacaggtgatctggaactgaaaataataacaaaaaattaatgaagcttacattaatgagatatttaaatattaccttacttttttcaaaaagtgttccttttctctctctttcccatgatttttttaaaaaaagcttttaattgctgcaaaccggcagaaaaatacttatttatatcttaaaggtactgctcaatgaattttcacaaactaaacacgtccatgtaaccaacacccagatcaaattcttcccatgatttgatcattcagaaaatctttgacaaagaggttgacaaactcaagctggagtcagacaacccagatgctaattctggctctaatagggatgcactggttgacttaaattagctccttccctacatcctttgcatcctaatttttctcatgtggaaactaagagcaacacattcccctgcccctccaacctcttgtttcacagtggagttccaggaccataactgcaggcaaccaaaaccgtcttcctaaagctccctctcctttagcttccatgagtctagaccttcctgaatttcatccactgcccccggattattgcttagtttagtttctgttcatctttgaatgaagacatttcccaagattctgttctgcccccaactctcctcagtttctcattaaatttctcactgcactttctcattcaattcctggttagtttcatctgatcacctccatgtccagacttccaagtgcaaaatccaaccctaatttttctccccaactccagtccaagattttcaactacctgctgatatcttcaagtcctgttgatacatcagtcccaatctatcaaaagagaaatcatctttcctccccataccttctccctatgttatattctttactttgattaccacttctggtcacctctgtaagacacctgggaatcatcagctttctctggttcacttgccaaatcttgttaattctaccaccccaatatcctttgaaatgtccctttgtcactatgcctaccccacttctctaattcagttcatctgcctgagggatttcaagagtttcctgactgatctgctactcatggatctaatttctgcaatgcatctttcattctctaatggacttcttttcctaaaggtgtgtcagatcatgaaaatttcctgcctttagtcatcctacataaaagcagaataaagaacaaactccttggcctgtcaacctaaaaggacggttcctttccagaaccatccaccatgaaatagcatcatacaaattacactggagcctcaccagagtgtgcactgttcctgcatttccataaacccatgattttctaactttttgcctcttctgtactcaccaaagtgatatgtatccttaaatttcttccctggccttcacaatcagaataaattagcccttcatttcagaaccaacaccacttttttttaatacatatataagaacttaaaaataaaactacttttgtctactttgtgtcaagcatttgaataggtactttatatgctataattcatttaatcctcattagttgaatcttcacagcaactttacattttagagatgagaaacttggtctaattaaggctgaatggttcacccgaggtcttactaaagtgaagtaaacgtaggagccaggatcagaatccaagactttgggattccaaagtcaattttctttatacttcgcaaaataatttctacagctaattgtttatatgtgtctccctaaaagactgcaagctctcagctgagaatgtgaataatctatttcagcccactacctcaaccctgcaaacacacagacacacacagacacacacacacacacacacacacacacacacacacagagacaccctaattgggttacttccacaacagtttgactctgtaactgttgaggaggtgaatgaataaattatcaaggttcttacattaatacctactcagatcttatgatagatattaatgacaaaagaggtatttctgtacctgtctctgtggaacttgcaaacacagaaaagaacaataacaaaataacatcagttgtagcatttactagtccagaaatagctcacctatgaaacaaacacaattttaattcattttccccatcccctaataggaaaatagttctttctgtgggggccaagggaaaacttccctgtcacactctgaaggttcactgaaaatcactgacaaaaggcagattaacaagagaaaaggcatacaaattcatttggtcatagttttgcatgacacgggagccttcagaatgaagagccaaagagacaggagaaattgtccatttttatgcttagattcaacaaaggatgaacagctgtgttgaaacacgattgggcaaaaagggaatgatctaatggtaacagactgagtggggaagctcagcaacgcctgtctgtttagatttctgggcctctctgaagctttccttccttctgggtatgaggcaggcccctctctggaatgcaggtgttatgacctacagtcaaacaagtcagataagttctttacggctagtttttatacagaagtggggaggagtgtagggggcagttagagtagtatttttaggttttatggctggctttaggggaaaggggttctggcttctatgacccgccttcaggaaggggaattctagtttctatgcctaaccttgggggagagtaagaggccagagacaggagggaacgaggtcagagaaacatgcttctgagtccctcatattgggatatcattttctgagctttaacatttctgtaagaataatgacaactaatttgaggtgcagcactaaaaatagaaggaatctagcagctcttgaggggtccatcctgagttgctttgttctgatcacttagcatgtgatcttgctacctagaaaattattttacctgtggtttttctcattgaaacccaggccataaattccatcctgcactaccttccttccactcgatcacatttgcattttttggctgccacgagacttaccttgagttctgcttctttttttatttttatttttgagatggagtctcgctctgtcaccaggctggagtgcagcagcgtgatctcggctcactgcaacttccacctcccaggttcaagcgattctcctgtctcagcctcccaagtagctgggactacaggtgcccaccaccatgcctggctaatttttgtatttttagtagagacgggtttcactgtgttggtcaggatggtctcgatctcctgaccttgtgatctgcccacctcgggctcccaaagtgctgggattacaggtgtgagccaccgtgcccggcctgagttctgcttctttccaagatagatcctctggttttctgttgattctgtgagcaccaggtactccaaagaatatcatttcaacaaacagttttctgtttaaaccaatcaaagtaagatcctatggcttgaaattaagaatcttgcctgacataatccctgtctcttgataaacacaaacaggcaatcaccaaaccagtgccataactccacaactcaatttttaaaaattaaaatataataaatcccctctcttttcatttattcgttcgttcatggcaggtacatttctagataatgaagatacagttataaattttgatggattttacaattttcatatctttgttattggcaaccaaagggtataacatgcacagtccagacaaggaagttaatcagaaacagtaaaaacttatcttcccgaaatgataacctgaaggtcaaatacaacaggagctactcttgccctttcaaatggccaacaatctgaagatatcaactaaatgccaaatattaccaaaagtaaatactataggagttgcccagtttgttaggtgagagtttaaaggaaactttagaaagaatgagcctgaaatgatgggaggaacacaggtgtgtatagagaaggagggatggaaccatttatggtgaaattttctcagaaatggcacaaagaaaggagctcaagaatcacagtcaacacccaaggaggagggtaattcattggattgaaaggatcccagaggaataaaaagttgtagaagaaaagaccaaactattgcatttgctcaccaagttctagagaattattttatcctctaggtcacagagatgggctgcagggggtggatagataagatgtggtgtgcaagttcttaaaatatgtactgcatatcatacattttaggtgggtattggacaattttcttagtgaataaagaggaaattcatttagcaaaaatcaaaattaaggtaactctagcattctttttcctttctctctgaaaaggtaataattgtgatatctgccaatttataatagaaatgtttaaaaacaaaagaattaaacttagagagttctccttaaaagtcagacaaatttatcaacaaaagagaagaaaccattgtctcaagtgtctttttgttgtttctttattcttcttattttctgcaaaaaaaaaaaagaatgagcctatgaaaagcaatgttaatgatggcacactctggggttttcactaatgttttaaataggctttacatagagcagcaattatgtgagatgatatagttaaacagtatcgataataaaatattccatttgagcacctcaaaatactttggactaattcatattagaacatcttgctatcagaactgttgagtttaaaataatatacacatatgtatatgtatactcatatattatataaacacagttacacaaaagtaaatttatttattaatagattcatccctttttatctatggtcataaaattcaaggatcagtaatagaatccatagatcccctaaattcatttgtgatttttttttttttttttttgagatggagtctcactctgtcaacaggctagagtgcagtggcaccatcctggctcactgcaacctctgcctcctgggttcaagcgattctcctgcctcagcctccagagtagctggaattacaccactatgcacaccacgcccagctaattttttttttttttttcagtagagacggggtttcaccatgttggccaggatggtctcgatctcttgacctcatgatccacccgcctcggcctcccaaagtgctgggattacaggcatgagccactgtaaccgactgcatttgtcatcattttttaacatctttcttattcataaaccaattagctagtgggaaaaaattaattagcatttgtaggatatactttttttttttttgagacagagtcttgttctgttgtctaggctggagtgcactgacacgaccttggctcacttcagcctccaccccccaggttcaagtgattctcctacctcagcctcctgaactacaggcatgcaaccaccacacccagctaatttttgtatttttgtatttttagtagagacagagtttcaccatcttgcccagtccagtctcgaactctagacctcaggtgatccacccacctcagcctcccaaagtgttgggattacaggcgtgagccactgcacctggccaggatatactatcttgattttttcctaatcttaactttaaagatgctcctatgaataatactaataaggtcccaggtaatgagagagaacaaagggtaaagagtcttggtaattcccaggctagacaaatattaatagacctatggagaggtacaagacagctgacttgttagaactgtgcagtttgttactgaagccaaaaatttggcagtaatttctagacagtaatttcgtaagtgttttttttttttacatttatgcccccatgtttaacccactagcaaattcagttgactcagcccccaaaacacacctgagataatctatttctaggcatccccattataatcaccctggtcccatggaccattatttctggcctgaactaatgcaacagcttcttaattggttttgctgttgccattcttacccagttacgatccatttgccccatgacttaaagaatgaactttttttttttttttttgagacagagtttcgctctgtcaccaggctggggtgcagtggcgctcggctcactgcagcctccccttcctgggttcaagctattctcctccctccgtctcctgagtagctgggattacaggtgcccaccaccacacctggttaatttttgtatttttagtaaagatggggtttcaccatgttggccaggatggtatcaatctcttgacctcgtgatctgcccacctcagcctcccaaagaatgaacttttaaatacttaaccagatggcttcattcttcttttaaaagtttctcattgggttcacattgctatcagtaaattaggaacttcttactttggcatacaacgtgagaagatggaactgccatctatgtgcccaatcttattctttgtcacggtctttttcatgtaccatactcccagctgcccttcctcagttcctcaaacacaccaatcccatttcctccttacggcattgggactagctctcacatgatttgaaactctcttcctgctcacctctccatgttaaccctaacttaaatgtcacccccttaggccatgggaacacccaatttaacctaattcttcagccacattacatggctcacctttaattctctccatagcacttagtgctgtctcaatttaccttctttctttctccctccctccctctctctctccttttcttccttctttctctctctggttttttttttttttttttttttttttgagatggagtctcgctctgttgcccaggctggagtgcagtggtgcgatctgggctccctgcaagctccgcctcccgggttcacgccattctcctgcctcagcctcccgagtagctgggactacaggtgcccaccaccacgcccggctaatttttgtatttttagtagagacggggtttcaccgtgttagccaggttggtctcaatctcccgacctcgtgatctgcccgcctcggcctcccaaagtctctttgtttctttctttctctctctctctttctttcccctttcccttctaaagatcaagaattatgcatgctttgttcatcactgtgccaggtatggagtatgcactttaaaatgcatatatatatatgcgtaaatatacagctatgtacatatagtttacattttgatatcatgcagaccgatagctatgaaatctgattattcattcagtgaaggtttactaaacacctatatattccaggcactggaatatgagacagacaagactactgtcttcatgcagcccacatttagctcagggagacagagaactaacaaacaaatgaacaaacaaaagaaaatttcaggctgtaataactgctaggaataaaattaaaaaggtaatatcaaagaaagttataatggacttgttcaaaaagcttcattaaccaaacgcaccaaaagaatcaattgaaatgttcaagtagaagacattttgcaatttttaaatatcttattctccaaaatcttccacacgtttggaagcagttgtccataaactaccttcgaatgaaacatccactaaattactgccactagaaaaagaaaagactggctcaatgctcaagattaaaatgcaggctgacactttctgctttacttgttttggggttgtgtggagaaatgctgacatctttgccttttttctttgagatggaatctccctctgtcacccaggctggagtgcaatggtacgatctccgctcactgcaacctctgctgcccaggttcaagcgattctccttcctcagcctcctgaatagctgggaatacaggcgcccgccactgtgcctggctaatttttgtagttttagtagagatgggagtttcaccatcctggccaggtggtcttgaactcctgaccttgtgatccacctgcctcatcctcccaaagtgctgggattacaggcgtgagccaccgcgcctggaccatctttgccttttttgaaaatagaaagagtagtaattcttgcattgagaatatgacataatcccaaccccaaaccatgagtctcatggccatgtctaagccacgccctgacgatagggttgggatgactacgccaggcttagtaatgcacagggacaggaggcatttcggaaccacaccacgacactgctggcaagaaagatgggaaaacggcagcaattctgtctgctgtgctttgtgtgtgtgttctacctggctgattgaatttcctcccaacacctacctcagatgtgttgtctaggtgaaaataagcacttcaatgagctggtctaattttaatcctcagcccttcccagtcagccccgcccccatgtagttacctccgtcatgacaaagaggaacatcccaggtgcaaatctagcacagtttccctatttcacctgtgtccccctccccatcttcatgccagcatcagaaacaagagtccaaacatcctcggcaacactacagaagctgttcaaacaatccctgtgttctttccaatttgccgacgtggtctggcaaacaaagagatttctttgtttctctaagaaacaaaggtttcgtaagagaaaccttaagagatgataaatacaattaatagagagatagccaggcaaggtaagagaatgcttgactgttttaactgcttatcctgtgctgtaacagcttacctaagagatgtcagagggacggacagaaacctatcagcgctcaggcagaacaggtgctccagtggaggcaaggactgcgcctgcatctgtccatgcagaaactatgttctcatggatacaggctgatgatagtaaattctggtgggctatttactggtggagtgtctgttcccaaagaaaattaattattaaatcagtgtcaacttagagagatgtctctagtggtctgccgcagggcactgtctggggcactgtctgaggcactgtccactctgccacttttaacagtgctttgatggcctggggcacacagatgacacacttatctatgtgtgataacgctcagcctagaggaacacagaatgtattgaataaagggatctgattcagataagtgggcataatggaaatttagcaaggtgatatttaacaaaccgcgagcttaccttaaaaataaaaatgaaatccccatgagaatggatggggagaatgtaataaacattagtacaaataagacttaggagttttaatttaccattaataatagtaattgtaataatgataatagtaggtagcacttatcaagagtttatcatgtaccaagcactgttctaataatttaaaacttatcattagaggctgggcatggtggctcacatctgtaatcccagcactttgggaggctgaggcaggaggatcacttgaacccaggagtttgagaccagcctgggcaacatagcaaaaccatgtaagtatgaaaaattttaaaaattagctgggcagcctggcatgcacctgtagtcccagctactcaggaggctgaggtgggaggattgcttgagcctgggagactgaggctgcagtgagctgtgttcatgccactgcactgcagcgtgggtgtcagagccagaccctgtctccaaaatataaaataataaaataaagaaaattaaaataaaatatattattaactcatttaatcttgacagaatctttagagtaccttattggtatctccattctataggtgaagaacagatgtaaagtaacttaaaatgaatcaataatgtaatgtcattgtcaaaaagtattaatgtgatcttagagaatagggtccagaacatgagaattgataaagcttctctaactgcacttaaattattgtattctgttttgggcaaaatggagccttgaggaaaaaggttagcatgaccaggaatgcaaccatatatatatatattttttctttttgagatggagtctcgccctgttgcccaggctggagtgcagtggtgctatcttggttcactgcaacctctgcctgccaggttcaagtgattctcctgcctcagtctcctgactagctgggcttacaggcttataccactatgccccggtaatttttgtatttttagtagagatggggtttcaccaagttggccaggctggtctcaaactccggacctcgtgatccacccacctcggcctcccaaagtgctgggattacaggcgtgagccaccacgcccggctccaggaatgcaaccatttttaaagaggaacaatgaatagaaaagtctgatggatttatggctaaataacagaaagaagggtagaacatgagagtttgagtgaggacttcaaacccttcgtaaagttcagtttaaatagcatgaaacatatgccctgctgctttggagtgtggccatgaaaataatagcaaacacattccatggaatatttactatgactttcccagattacaaagtacaaggattagatgtggaaaagaataaatagaagctcaataaaaagcaaagctttctagtgggattgctttgtgagatgggaatcatgcctcactgaggatgtgcaggcagtggctgaaatcagatgacacagggcgaagggacctccccggatctctactctgtgagtctataaagaataaactgcagacactattttggtaatagatcaacataagaaaatttaaggctagaggtcaattgtggtaaccaaactaaatgtcctctgaaaaggcctccacctgtacttctaagtgtttccataaaatttagtaaatattggccaggtgtggggctcatgcctgtaatcccagcactttgggaggacgagaaggatggatcacctgaggtggggagttcaaaaccagcctggccaacatggtaaaaccccatctctactaaaaatacaaaaattagctgggtgtggtggcgcttgcctgtaatcccagctactcgggaggctgagtcaggagaatcacttgaacccgggagggggaggttgcagtgagctgagatggcgccattgcactccagaccctgtgtgtttattcactaggctatcccctgcccacccagactccatcatgaaatgaaaggcaggcatagcacaatattagtcagataagagtctcatattatgtgggaaccatgccattttatttctgaaacagcaacttcattgtgaggcttagaaatccctgagctttgtggcaactgaagacctgtcaccgtcaccgtagctggagtagtgagcaacacgaggtggtgggacaaaagccattcctttaagtgtcctctgtacctgacaaaagaggacatcaccaaagacctagcatacagttggtactcataaaggttggctgaattgaggctaattttctagctgcagcaccagtcctgtttataaaaaccggtcaaatcaatcttctacaaggaattgaacttcgagcactttgaagtttctaaatggaagtctgtatgtttcatcaagcttaaaaaacagtccaaggcattgatgtagcaaggcgttatggtgtcatagaaaggaaactggacaaagagttaaaacaaaaacggatttgaatcatggtctgtctcgatgcctcagtttcctaatgtggaaaacaattttatttttcacaagattctaaaaatccaatataattgcgttaggtgaaaagcattctgtgtacggtgacaagttatacaagtataaataatcaatatcattactaacaattacattattattaattgaatgagtgtattcacccattaatcattaccaatccattattacatgtgtattattaatgattattattcaattattatatgtattcatttattatacatgtaataattgagtaataaattattcaattataattaataaataatagttaattattacatgtgtaataattgaatacatgtactaattgagtaataataacaaatacacatgtaataactggatacactgaaggaagtgtattcacttatggtttataaacattccaacatcagatatgtaatatttgcctctttgtcatttagaataatctgtatcactagtcaagtgtttgtatccaaaacccaggaacagggtcgacttcgtgggtgtgtcacctgagaggtgacacacggttccaagcttaaagggccttgtgcttggtttaatgctctgctgtttccatcctgaaattcttattagcgtatgcatttttattttgtgctggacctcataaattatgtagccagtcctgtggtgtgaataaaagctgaatctgaagctgccagggtaggagagttggaggaaaaggtgggcttacaggaggaagctcctagctgtctgcacaggagggtagtactcagttgcatctgactgcagcactgaataagaatctcagggaccttggatatcattcagacccatctctcatttcaattgaagaaatcaagagtcccagattttcggccatttgcccgaggtgcccacctcaccagcagggtgtcctctacattctgtctaatgaatgaatggcctgccctggaacataagtagggcttccgcgttgttgtaggacagctttgtgttccagatcacagatgtctctttcataagccacacctcctcccactgctgtgtgggccacagctccggttagatgataactctttgactttttctcaaagtccctgaaatcagtcacagagaaaatggactgatcctttacatcaatctgagtgtccttgtgcgtgtgtttcattttgctttctattcatcctcaatgattgccaacctgcttgtgagatgtacctgagaataaccttcagacaaacgcagtgggctctgcattgatggtgctgattcagaacacatttggggtgttgtgtcatctgtctattagaatgcttccaaaggatgacgactcactgatagataatgttttgtttacaagcatgtccttgggtatgagactttgtagtgtcatgactgaccgtaaatctcactggcagtagcacagcatatgaaacaccttctgctctagtcattactttatgttcatcacaaacaaatcagaacaaattctgaatgcgaatctcctttcaagttagctgactcaggctgtcggaactcatgtaaaagcgaaccaaatatgacaggaggtgaaagctggccgtagaactggaaacggcagaacgtcattgaagtctgcctaagaactagtcagcatcccacctgcttgctcacagtcacactcaacatctctgtggaatttttagtgctcttttttgtattagtcttttagtcgttaccctagtgactctgatatgcattcctaacttatcagtttactttgaattaacattagaccacttgatatataatgtaagaacttcttacagtgtaatttcatgtacagacttcacaatccttttgttgtagctaaagtttacttctacctagattataaactccacaatactttgtcattaatgtactttatcaggtatgaagattcagttaattttaaataattttttaaaaagaaaaatactctttttcactctgatgcccaggctggagtgtagcagtgcaatcactgctcactgcagctttgacttcccaagcttaagcgatcctcccacctcagcctcccaattagctgggactacaggtgtgtgccaccatgcctgggtaattttttctacttttagtaaagacagggtctcactatgttgctcaggctggtctcaaactcctggactcaagtaatcctccccccgggcctcccaaagtgctggaattacaggcacgagccaccatgcccagcaagaaaaatagcctttatatttatctatgtattaacaatgtcttttacttgcctctccagtagatctaattttctatctggtatcatttcctttcagcctgaagaccccctccttgagcatttctcatgttatagacctgtcagcaacaaattctctcggtttttatttatcttaattttttttattatgccttcattttaaaaacattattttctttaatatagaattctagactgacaaggtattttcagccctagaaacttatcattccatgttgcctggtctcaattatccaatgacatgtcaattgtataagctagtttaaacaattcttgtcatttttattcaatatataatgttttttttttctttggctgacttttaaatttttctttcaacctttggacttcagcagatctgcttaaggtgtggttttctttattgactgagattcttgaatctgtgggcgactgttttaggccaaatttggaaaattttcagccagaatttcttcaactatttttttcttcttcattttctctcttctcttcatcaaggactacagataaaagtatatcagatcactctatactgtccctcagatcattgagaatgtgttcattcttaaaatctttttttaaatttgtgactcattttaggtaatttctattgattcgtgaccaaataaactgcttcttttgttgtgtctggtctgctgttaatctcatccagtacgttttttaaagcttcatctattatatatttcagttcttagatttacatttgctttatttttaaatttttcttatttttcttgaagttccccaattctttatcctaactatggatactataactttaaccattatatctattttttcctatggattctttatgtgcttatcatagttaatttagagtacttgtctgctaactccaatatcagaaatatttctgtaaaattattttttcttgactatgtctaataatttttagagtgccctggtcaaaataacttttgattgtatagtggcactgtggatgattcattgtaaaattttagaatccattatctctctttgaagagtattgagtcttgtactagcaggcaattaaattactaatgaatcaccctgactatgctgagacttgatgtgtttcatgaggatatgtctattttagttatgccatctctcagtcttgatacatggtatttattactaggagtggcccttataggttttcagtgaaaagttcaacatagttatcaatgccctctaacttcacgggactcatacttcaaacgctggctcttagcaacaggaagtagttgaaatctctgttaggctctttcagccttctgactgttggtttcctctagggctccttgactatttcccgaataaatgagcaggtcaggagtcaaccaaggacttgagaggagtttacgttcatattgtgcaacccctccttctatgtctctctcttttctagtatttcctcccccagtttccagctgctctggctgttctaaacttcctttctgactcctcaggcaaataggacttcaaaaattttttttggcctcagttctagccacccaagagatattattcgggaagtcctcgtaggggaaaaaaacagtgtgtatcttaaccaatgtcattcccttgtttgaagcgttaaatgccctctaattccatctgcatttggttgctttcattaacttgaaaattctctttctatttttccccagagtttataattgctatcagtagaaggcttaatcttatacaagcacttctaccatctccaagaccagagtgctccattggtttaatgtgtaaccatgagtgaacaaaattgttttcaaaaaatagacaaacctcactgaacctcaatgaacactgaaaagtaagaataaaggccgggcgcggtggctcacgcctgtcatcccagcactttgggaggccgaggcaggaagatcacgaggttaggagatcgagaccatcctggccaatatggtgaaaccccatctctattaaaatataaaaaaacgtagccgggcgtggtggcatgtgcctgtcatcccagctacctgggaggctgaggcaggggaacaggctgaacctgggaggtagaggttgtagtgagccgagatggtgccactgcactccagcctgggtgacaaagcgagaccctgtctcagaaaaaaataaataaataaaataaaaataaaaaaaggaagaaaaatgagaataaaaagaggtaaaacatggcgtttcatcttataaatttaaaatatacctgatttggtactgaatgattgtaactaagtttttaaacagtgttcatggcgtgactgtaaacccagctcacttttagaaaaacgtttttaccaacccaaacagtatcctactcaacaccagttatatttgtgggaagagagatagagttttctggggaaaggcccactcttctaagaaaatatatggttttctttgcattacttttccttctttattccctattcacgctattgaacatgtctatcccaacccttttttctggtcacataatccaggtctgaccacttggccttcttcttctcaatgtaattgatttaggaatgagtttgtggcccaaacaaatggaaagagatataatcctgggaatctgaatgaaataattggtaagataaagttttcttttcactgaggtagacagtagaatataaacttggaactggtatggccatcttgtcatctcttgaagacagcctgcctaagaatgaaaatcaatgctgagaaatataggacagagtcctgacaatgtcagttaaacctgaatccagcaactctgatagctatccctgattgcttagttatttgagccatttcattattgttaattgcccttacagcattttcagctgagttggtgttgtagaatgaacatttgtgtcctaccacaaattcatatgttgaagttctaacctccagtgtggctgtatttggacacagggcctttagggaagtaatggaggttaaatgaggtcataggggtggggccctgatccaataggattggtgtccttataggaagagccactgagcttgctttctctctccaggtgcacatattgaggaaaggccatgtgaggatatagtgagcaggccacctgctatgagccaggaagggaccccctcaccagaaacagaattttctggctccttgattatggacttctaggtttcagaactgtgagaaaataaatgtctgttgttgaagctacccaacctgtggtttttgctgtggcagctgagcagactaattcagttggggtcacttaaaactatgagtctccagtcatccaggaagtaggggtgcaaaggcagatttgtactgtgaccctgtcatggcaattcattctactggcaaaaatttccctcaattaaaacccaaatgatttcaaaacaccccataataggatcagcaagagactccaccaagactgaaaatccactgtgccaacaaaagccttctaaatgcacgttttagactttccttttaccttttcaagtggctcactggcaaaaatcaaggttctaattaaatctaaagggctatccaatcacacggttggcaccaattactcatttaactatgtatgtgttaagcataagctaattgcctttctctcaaaccagagccagttcagatcaggccattcaagagcatttaaacttggcacaagagggtagcactgaaaactgacaataaagaattctctcttgcaggagaacctttcaggaggctttcaatcaatttttgcaagttccaaaactcaaagaagcaaagctaactatgtagctggtgtatttctttctagatcttgaagcattaataaaaagatggactcatctgagaatcaaatatctggtgaaactatacataaatagatatatttgtgtgtctgtgttcatgtgtgtgcatgtggatatgtgtgtgtgtgtataattgcatgatgttcttcctcaccttcaaattctgacagattctaaggaggaagggcacagatgtgtttcctgcaaaagagccccgagtatcttttttcacctcccttccttccctttgtccagatgagaatctttgttttaggggaaatggaatttaatatgtaaaatttattctcagtgagtttcaccaaaataggaaccatatctctaaccttatattattattatctgtacaatacctgtcaaacggagcccccagtaaatgctgaaagcacttcacatccattgggaaggtgagtgcatttccctaacgtattttagagtataattaacacacagtgcctaacagagaaaatcatttttgtgtgttcagctaaacactcaactccacataagttgcatttgatatcgggttcactcggagaaatggctctcacacttgagcctgtgtcagaatcacctagaggggctgttgaaacagactgctgctctgggtcctttccccttcccctgggtttctgactccttagacttaagtgggggggtcccagaattacaatttttgtttgtttgttttttgagacggagtctcacactgtcacccaggctggagtgcaatggcgcaatctcggctcaccgcaacctccacctcccaggttcacgtgattctcctgtctcagtctcccgagtagctgggattacaggcacacaccaccacacctggctaattttttttttgtatttttagtagagatggggtttcactatgctggcaagactggtcttgaactcccataattagaatgtttaacaagttttctggggatgctgctgctgctggactggggaaccacactttgagaaccattggctaagaagctataggacaagagaggcagcttgccagcaggaaaggcattaagtgctctgctttctgggggagttttgcagtagttcacccactgtcaggagctacaaggctcacatccagctggtgtgagggcatcatgacttaaaagctacatgcctcacatctcttgtaataacttcatagacatagtgatgcggtttggctgtgtccccacccaaatctcatcttggatttccacatgttgtgggagggactcagtgggaggtaactgaatcatgagggcaagtttttcccatgctgttcctgtggtagtgaataagtctcattagatctgatggttttaaaaagaggagtttccctgcacgagctctctctctttgcctgctgccatccatataagacgtgacgtgatcctccttgccttctgccatgattgtgaggatttcccagtcacatggaactgtaagtccaattaaacctctttcttttgtaaattgcccagcctcaggtgtgtctttatcagcagcatgaaaacagacgaatacacagagcttgcagggaccccactagagatgtgccagttacccgagtcacagtctgagatggtcagagttatggcttcctttcaggtatttacaggtcacccagtacaggaatgacacccattagtaccaatcagggatcactttacaatgttgcctagtgacaaagttgaaacataccacctttgtatgtttgcagagaaacagagctagaaagataagatcaaattttcatgcagaaggggaaagaaagcattcctttgttaagcctttattcacaaggtacatatctttactcacattatgcccctattttaaaagcttaagaaatgtaaacattatgtcaaaaatttttcattcttggtttagctgaatctcaaagccaccagttggaaggatcatgccaatcaaggaagcagatggcttgctttgggcttcttcaacaaaatcacctagatcctaaattgctgtttctgtgacaatccatattgtctgtttctgttgcacatgataccacaggatttgctaatctctaacctaatttgtaaataggaagtaaatttctacttcagagcttctatcatctagtttttcttcacctgactgctatatggtctgcttcattttgttatgttgcttacttgaaaagaccatggagaaaatgtatttgttatttaaataaatacccaaatttgcaactccagatcttaactctgctaataaaagaaacttttaaaagaaacaatcttggcctaagtaaggaattcttacccttgttacataaacctagagatctaaagaagtaattattagccctggttgcattcacttaaagatctttttaaaaatactgacgcctgaaccatactgcaggccaattaaatcacaatgtctagagagatagggtccaggcacagaatgttcttaaagctccccagataattctaatgtagagccagcgttaagaacttttgaaactaaagtctatcactgagagaaaattatttttccttcctgtcacccttcctccccttctccttttttttaagaaagaaaatactgggaaagaaatcctaggctgtaattatgtgggttggttacagctttctttacaaacactcctgggttatcagaagaactgctctaaccttggggcaggtggactcttcctataatgacatgtaattattagtattattaatacttttgcaatcatattaataattaaggttcttttgcaataaaaaagagacatgggccaggcaggttggctcatgcctataatcccagcactttgggaggctgatgcaggaagactggcttgagctaagaagtttgaggccgcagtgagctatgtttgcaccactgcactccagcctgggtgacagacagagagagagagatgaaaggaagaaaggaaaggaagaaaggaagaaaggaaggaaggaagaagcaaggaaggaaggaaggaaggaaggaaggaaggaaggaaggaaggaagagagagagaaaggaaggaaggaaggaaggaaggaaggaaggaaaagaaagaaagaaagaaagagagagagagagaaaggaaggaaggaaggaagaaaggaaggaaggaaggaaggaagggagggaaagaaagaaagaaagaaaagaaaaaagaaaacaaaagaaggaaggaaggggaaaaaagaaagagagaaagaaagagaaagaaagaaaaagagacatgaatctaagctaaaaaattagacaaagattaggttctgcacttcagtttaaaaaagaagaaataagtacgcaaatctatcatttaatgagagcaaatatttatgtctccatgtcttaaaaatgcagatgtggcatagactggcgagatgctcacccacctgtttcctttcttcctgagcatgtgcctgaacatttcccagcttcctttgtccatggatatagtgacgtgactgagaatagtcagtggaatacgggcagatgtaaatatcacatccagagctggtcaatgaagcctacccatacatgactgtgatagttacttttatgtgtcagcttggctgggcgacaacgcccagataagtagttaaacattattctggacgtttctgtgaaggtacttttgaatgagattaacattcacatcagtgggctttgaataaaacagattgcctacaagaatgtgcctcatccaatcagttaaaggcctgtatataacaaaagactgaccacccccaactgaaaaaagaattctgtaggagatggccttcgaacttgaatggaaacatctactcttctctgggtttccaaagttctggcctattctataaattatagacttgctagcctccataaacataagccaattccttaaaataaatctttctttcctttctctctctctctctctttatacacacacacatacattttatactcacacatatacactttatacacacacacatagacatacccgtattctattggttctgtttttctggagaaccctgactaatacaatgaatttctaggaagaactcttaagaatgaagaaagaatttgggtttctttgttggaagtcctcttgccaaccagggacatccacatggacttagcatgaatgggaaataaactttcattgtgttaagctactgaaatttgtggttgtgattgttatagctgccagcattacttgatctaactaatatagcagatggtgaatgagatggttgttaatttccctttatcgctgacattctaaagcagtggttctcaaactcagctgtgcataaaaaaatcttaaagctttgagaaagtactcatacttggtctttaccccgaaattacgatttctttggtttctgaggtatagcccaggcactggaatttctaaattctctccaggtgattctaatatgtcaataatttgaagaactactgttatacaggatgactgagaccagagttaaaagttcatggataagagaaaccaagagggttctgttggtgaaaggcttcatctggatgaatggtatgattttctggcctcaaagcagagctcttgagctatataattatcgttattattaatagtaccaagaggatacatgcattatcttactaccttgctaaattctcacaataaaactcttccataaatattatgattctcacattttaaatgagagaagcaaagctcaaacagagattaaggtaacttgctcaaagtcacacagctaaggagtagagcccatgctcccaactctaacctgtaatacctcccattatcctaaagaaaatgctatcccacccccagccccccaccccctgacaggccctggtgtgtgatgttcccctccctatgtccatgtgttctcattgtttaactcccacttatgggtgagaacatgcagtgtttggttttctgttcttgcaatagtttgctgagaatgacggtttccagcttcattcatgtccctgcaaaggacatgaactcatcctttttgatggctgcatagtattccaaggtgtatatgtggcacattttctttatccagtctattattgatggacatttaaataacatatagtttcccaagccatttagcaggagaacctgctatagatcgagaaccactataattgagaaccactgctttagaatgtcaacgataaagggaaattaacaaccatctcattcaacgtctgctatgttagttacatcaagtaatgctggcagctataacagtcacaaccacaaatttcagtagcttaacacaatggaagtttatttcccattcatgctaaggccatgtggatgtccctggttggcaaatgtcctgatttgccaagatttgtcctgataaagaaaatgtcctgatcaaaataagtaagaatcacactgtgcaacttgctgctcagatacctgaaatattgcattcaattcccagagtcccagtttaaagaagaagatagtaaaattgtgttcagagaggagcaagtaggttgttggaaagcctggcaagcacgaataagtggaagagaaaggaagggttagatcccagaaaggcaatgctaaaaaagaaggaatgattaaagaaagagaacataatagcgcattcaaatattgtaaagtttgtcacgtgaaagaggaattagcctgttctccctttgtccagagggttaaatcaggatcataaattagacattgcaaaaaaaaaaaaagaaagaaaattctgtttggtataaagaagaccttctaataattagagcttttctgaaaactagcagggttgctaggatttaatgagaaaatatgttctgtaaatgcgtataaaacactgagtatttttgttgctattatcatgtaggtgagtgttccattcattgaaatgtgcaggtacatactgaaatggtggttctgcacaagataggaataagttagatggtcattaaggtccattctaatcctaagattttatcctcacatatcttgggtccctccaaaaaaaaaaaaaagtgttttataaaatgtcttgtctaatgactggttgactggtgaccaatatatatatatataccatatatatatttctttaatttattttttaattatactttaagttctggggtacatgtgcagaacatgcagttttgttacatagttatacacgtgccttggtggtttgctacacccatcaactcgtcacctacattaaataattctccaatgctatcccacctcccagccccccacccctcaacaggccctggtgtgtgatgttcccctccctatgtccacgtgttctcattgttcaactcccacttatgggtgagaacatgtagtgtttggttttctgttcttgtgatagtttgctgagaatgatggcttccagatgcatccatgtccctgcaaaggacatgaactcatcctttttgatggctgcatagtattccaaggtgtatatgtggtacattttctttatccagtctattattgatggacatttatataacatatattttcccaagccatttcgcaggatatgcagtctatttcttcccaccataaaagttaaagaaaatctacagcaataatttggtcaattgtggtttactgaaaacttactaggaggctaactttgagatattcactttacttgaatataaatatcacgaagtacatatagtggatagagtacttcctgagacagcacgaaggcccatgtctgtcccctttagctcctcccatagtcaatcattgtgttgagttgttcagtctgcattgtctcatcttctccatggcaagcttttctgaacaggtccactacgctttggtattctctccacagtatagctcagtgattgccacaccacagatgctcaacaaaagtttgatttggagatgacctagaccctacaaaagttgtctgtggtcctgcactcacagcatgataactgagggataatgtacaaggaaaaatgtgttttttttttcttttaaaaaaattttatataaatgtaagggatacaagtgtagttctgttacatggatatattgcctagtgatgaagcctgggctgtcagtatacccatctcccaaatagtggacattgtatccgttaagtaatttctcattcctcatcccccttgtaccctcccacttttccaagtctccaatgactattattccactctctgaatccatatgtacacattatttcactcccacttataagtgagaacatgtggtaagcaaaatacatgttagatatatctctgtaatgaaaggaaaagtaaaagaatcagtcttaaactactgaaataatttatgcatttctcccacatgtggcaaatatatcaactctctttaggtataatatacctgacctcattgctgatagcataagagctttaaacaaatacttattcaatacttagctttttctctcataaaatggaacaagatatactagggtagagaggacgcttctcacgttcactgctgtatcctcagcacttggtacatagtgtttgcatcacaaatactggctggatgaatcagtgaatgaatgaatgaatggggaggctatggatgtgaaatgtttgatatgccttttagagagatattacaggcctttgagtgactatgatatttccaccaagcttctcttttgagcatataacttagtaagtatcttaaagttcatgttgacagagagggtgaaagtatgaatactttcttgagcttggttatttctaacttgttaggtacagttatcaacagtgataacagtccagcctgagctagatataaacaagaactgtatgccagctttcaaattgcagtttccatgataagctggctctgttttgctgccactgaatagagtgccatttagcagtggtgagagtaagaaaaagttgatcctttggtactaaacagttgagacctactcaagggagctgacattttcaacaccacttgaaacttgggcttggagccaggagaaagtttacacacaatcaagagggcactgctgcatctgcaaaagcagtttcctgtagctagatcgtaaaccaagagtgatggagatgagagcacccaagttcataaaaattccctaatatgttcatttgtaaaagaagaaaacaacattggccaaagaaagatgttctcctagaaaaaggaaaagaaaaaaaggaaatccatcttaccctctaggtgaaaaacacaaataaaatgtccgcgggaatattaaatgcttttccaaaatgtgcaaaacaataagcttcctactgtcctggtgtgcaacgtttgagaggaggctggaagaaggagcattcttgtctatgggcacctgcttctgccatgctggagagaaggcaaatctcaaagggtctggtagttaggatgattggatagagtgatatctctatctcagtctaaaggattggaagtactacacattcttccttcatacagtccaccttttctgagcacctgttagcagccaggcagtgtagtaggaatgaggagataatcagttagccagaccacccctgcactcatggatcttatacaaaaacagaggtaaaagacaatcaacaatggactgattccattacaatgatggtgttagaagaagaaatagtactaggaatttacatagtggtgaaatctgacctacttcattccatgagcaggtgacaccgagctgaacattgatgcataagcagaaactgacaaaaggaagccattgccaccattgataggaataagaaataactatttcccaaattctttatgttatcaaattattctccacacaggtgttttggctttgcttttttaaattctgaagtctgaagtttcagaaactacattgtaattgaaaataggtactcccctctttttttctctgatgctttcattaaaaattctcatcatctttttatgttacttattcggaccttaaaatgtataaaaatatgtgtggtttttgctttcagaaggcacacttgggatctgaagcagcaataattatgaactgacaatacgaaggttggctggctctgatgaggaactccaaggaccttaaaattcacttatgtcaagaggggaaaaggaggaatctaccatagcaaaataagacccttgtacaggatacacccacgtgcacacgtgcactgagagaaaatgagagttgtagggggctgtaggatcctgactgtctcatgcctacagtgagaggttcatagagattaaagagattgctcaggttgtccagcttggaagtgacaaaggctgggagtgctgaatactggaatgtaatggaatccatctacaggtaaaaagcctatggcaacaattagagggagaggtaaagtctctgaggcggcaggcaattggtacggagcctgaaagcccaggacaaagttttatttgctttcaagagcgaataggctcacacctataatcctagcgctttgagaggctcagatgggaggatggtttgaattcagaagttcaaagccagcctgggacacacagtgagactctgtctctaccaaaaaaaaaaaaaaaaaaatagaacaattagctgggcatggtggtgtgcacctgtagtcctagaagctgagatgggaggtttgcttgagcccaggaggctgaggctgcagagagtgagccatgattgctccactacattacaccgtactcctaggtaacacagcaagaccttgtgtcacctccagaaaaaaagaaaaagccttaacaaacagaagtgaaggtaccctgagggaatattctatttggctggggactccttatcatgattttacttagtgttgcagcatattgtgttttctgaaggtaggtgttccccctcaatctttctcatcccaccggcccttctccaatgtgaccttgccattcctccatcaagaagggaactctaacttgcctccctcttcagatctaggctaccttatgagttgctggtagccaacaggaggtggtggtgaaagtgacactgagtgacttctcaggctatgccagaaaagccatggggcttgtgcttgattctcttgggacactggctctggggaagccactgaccatggaggtgactgactagcctgacgctgctattttgaaaaggccacatgttgatgctctagtcaatagagtatcaggtgagcccagcgttctgtccaccccggccacaatgccaaaacacgtgaatgaggaaatcattgtagaagtgatctcctcccagccatttacgtttccacctgagcccctagaaatcatggagctgaaataacatgccctgtctaaattgctaacacacagaaacggtacgcacaacaaaatcacataaatatagataaaatccactaggttaaaaggagtttgttacacataaaaaaaatgactgaaataaatgttatattatctatctataaagactactatgggcattgagcccgctgaacagataagaaacccaaggtacagagagataaacccaactagatgatagaatcataagtagaatcttataaatgcagcaataaaatgatcataaaagtacatgtgaggacactgagtttcatagaaaaatgacttggatccagatgcacagttaataaaggcagatccaggaaaagaacttagatttcctgaagagtgctggagtctgaagctctttccaaaatattagatcaagcacggggtagttaaaaaaaaaaatcacatgctttggcatcagatctgggctgattatatccctgaggtaagtttactttatgcctggttgcccctatctttaaatagaaagaaaacagagaaagaaaaatatgaataaaacaatgaaatttggaacaggcttgtagtttaataggatcgtactaacgttaattacctggttttgattattcaactatgattacataaaatgctaatagcagcagcagctgagtgaggggtaaataggaaacctctgcactatttttgcaactttttgtaagtctaaaattagatcaaaataaaaaattaaaaaaaaaaaaaagaaggaaaaaccatacctaacttgtggggttttaaaaaacaaatttggaaaatgcaatgcctggtactttaaaaagatttcagatataattctcctctgcttccctcattccaactttctgataaagccagaacagatggcccacggacttctggttcagaccttgctccccaagaaaaagtcccctcatactgcaggtatatgccagcactttgcagctagaacacctctcagaaaatgaatcgaggaagcagacgatgggaaacttcccacggtagtgaaatctctaaacctcttctctgacctttgaattcttggcagccacaagctacgttcttgccaagagtcctcacgcgtgtagcttccacatctcctcgccctcatttagagggtagacttcctccacactccagtcatccggtgccatctgtctgtggccatgaattagctgaaagctctccgaaaccgccttctcaagctaattgagctgctctaaatatttgaagagacagaaatggggttataccagagatggtttaataaaatattgaaagagcttttttctaacggtgtagtagtccacttccttctttcctcccccagggaaatatgcatcttatcagtttatcatccgaaatgaacttgactggtctgggaaatcggccacaccgtcaggggagagtgaaggagaaacttccgggaaatgatcagaactattttaaaatcattttgctagtgcaaatcttgaacattcataaaacttatctatgaagataaagactgaacataaagaatagcaatgggcttggcctcctaccttaaaaccatagagattgactgtgttaaaatatattgttgaggatctgtaacaggaaacagataacctcggaagttcagcgtgaagggctactgcaccacagtcagcttctggctacaagaggaggagtccatcagttcacaaaaccaatgacttccatcaatttatatttaagtttttttttttcactgaataattctgtccttctaatataaatctgacttttctaaccttgccttatacttcttggaaattcctacttaatatgagtccatataatcagaaaacatgatgaatttggggcacaaaaactaatttttatttatttatttatttatttgagacagagtcttactccatagcccaggctgaagtgcagtggtgtgatctcggctcactgaaaactccgcctcccaggttcaagtgattcttgtgcctcagcctcctgagtagctgggactacaggtgtgtgccaccacgcctgactaatttttgtatttttagtagagagagggtttcgccatgttagtcagtctggtcctgaactcctgacctcaactgatctgcccaccttagcctcccaaagttctgggattactatcatgagccaccgcacccggccagggcacaaaaactaatttttctactaacagttgctgggtatgccatggggcccatcaacaatggagcccactttgactcacagttctgtgctctgagtgagcaaaaacattaacctcaaggcctgtacaatgcctgagcattttctgaatcattaagtacaatgacgcagggaaagagaggacaggaagaaggctgggaccaggcccccttcaccctagtgttctgtcctaggaccgtgagtacagctgcagtcttaggtgtgcttgtagatcgggaggaggcaggaagcttgggaaggaaacagacactttggttgtccccatattgcttctggacccctcatggtgctctaagaaggagagagcaaatttgtctactgagagggacattgtagtggacatcaagatgcaagttagtgctttataaatttatatttcctcatcttttcaagttttacctctgatcatgataactcttttggttgttggtcgtactccctcctgtttcccttgactagtctagaaatccctcctccctaagttctccacccttttctccttttcttcaggccaaaatgttctcaagttgcctttgatgaaactagatctgaaatgacttctagttgattaatttgttcatacaatatactgtgaaactgggcaagagatgatataaacactccttgaagctagctggggaggactctgccactgttttttcattttacaaatgaaagagcctctatttatggcttttgatgacatagaatagtctatttgataaaaattaatagtaccccctctagttctaataaaaaatttatttattataacaatatctttataaatgtggagtgtcttcctcttaatgattttctggaactctagtggtaagatcacattttgattaaccatgcctggctaatttttgtatttttaggagacagggttttgccatgttgggcaggctggtctcaaactctataggcacgcaccaccacgcctggctaatttttgtatttttagtagagacagggttttgccatgttgggcaggctggtctcgaactcctgacctcaagcgatccacccaccttggtctctcaaagtgctgggattacaggcgtgagccaccatgcctggcctcttttcccattttctaattaatcatttgtcttattgagttgtaagatccctctgtgcattctgaatacatgtctttatcagataaatgatttgcaaatatttcctctcaagatatggcttggctgttttcttaacagtatcttttgaaaagcaaaaggttttaattttgacaaagttcagtttatcaatgtttcttttatagattgtggttttggtgttacatctaaaaactcattgcctaactcaagatcagaaaaattttctaccatgttttcttttagacgttttataacttttgctcctctgtttagttctattattcattttgaggtaattttatgtatagtgtaaggtaaggatttaaattcgctgctttttgtatggatatataattgtcccagcactatttgtttagaaaacaatgcttaccccctttgaattgcctttacacctatgttgaaaaccaactgaccatacatataaaggcttattttgggatctcttaattctgttccattgttgtatatgtctattctctctctctctctctctttctctctctcttttgagatgccagagtgcagtggtgagacaatagctcactgcacccttggactcctgggcttaagtgatcctcccacttcagcctcctgagtagctgggaccacaggcttgagacactgtactcagctaattcagctaatttttaaatacatatatttttttttggagagaagggatctcattttattgcccaggctggtctcaaactcctggcttcaagcaatcctcctgtctcagcctcacaaagtgttgggattactggtgtgagccactgcactgggcttatatgtctattaagccaaaaccacattgcctgataaatgtaggctggtcataaattttgaaatgagtggtgtaaatccgctaactttcttctttttcaaagttgcttggctgttctaggtcatttccatttccatatatattttaggagcagtttgtcaatttctggaaaaaaaaaaaaaggcctggggggagcttagatagggattgggttgaatctgcagatccactgcagaacgacagtcttaactacatagaatcttcctatctgtgaacacgtaatgtctctccatttctgtagatctttaatttttcacatccatgtttgtagttttcagtgtgtacttcttgcacttcttttcttacatttattcctaagtgctttgtactttttgatgctatttttattgttatattgtccattgctagcatacaggattaaattattgtagttttgtaggtcattggcttatataaaaaaaatcttataatctttttacaggaatcatatggtgacatgaaaagggttccataatatagtccccacctgctactccagcatcactccccagcacccgtaagtcagaatgtatgtttccctagcactgaacttctaaaaattgatacatgttagatgtccatgtgataatttcatacatttacataatcaaatcaaggtaacttggatatccgtcaccttaattatttatcatttctttatgctagggacattcaaattattatcttctagttattttgaaatgtccaatcagctaatattaactctagtaaatttactgatctacggaacaccaggtgttatgtcttctttcaagctgtgtatctgtacccattaatcaacttctcttccctcctccacactgccattcgcagcctctggtagccaccacactactctctatcttcatgagatccactcgctagctctcacagtctcacatatgactgaaatcatgggatatttgtctttctgtgcctgactcacttcccttaacataatgacctctagttctatccaagttgctgcaaaggacaggatttcatgctttttttatggttgggtaatattccattgtgtacatctaccacatttttcttatcctttcacccattgatgaacacttagattgactccacattttggctattgtgagcactgctgcaaagtacatgtgagtgaggatatcgcttcaatatactgatgtcatttcttttggatatatacttagtagtgggattgctggatcatacggtagttctattttttagtttagtttttttttttttttttaaggaaactccatactgttttccacagtggctgtactaatttacattcctactagcaacgtatgagggttcccctttctccacatcctcaccaccatctgtcattccctatctttttattttaactgggataagattatatctcactttggctttgatttgcatttctttaatcgtgagcactgaactttcgacagtaccctgcaaccttatgatgtttttacttaaatttaatttcaacctcaagtctcagtttatgcattacctcatcctagaagcctttcccgttttctctctacttgcgctacgctgcatacactggggaacgcatgtgtgcatggacactgtcatttctataccaaattttaaactatactaaattttaactaactacttacatgttcatcttgagaaacctgtgtcaccatgtatagcaaaacctgccagttgtttatcgatatccatcttctctttccaaaacaatagaacccctaattttttgctaggcataaagcaaaagaaataaagaccatatttctggccccgcttgccattaaatgcagtggtacgattatcttgcatccagtgagagaagctcatcgggcagctcccagaaaccttccctcaaaaacagccaatgcatatcttgtttttctttttctttttttctttttttttttctccttcttgccagttaaaccagatctgctaaatgaggctagaccagccaccctgagtggatgaagtgaagtgactgtgggaacagagacccacatggggcaaagcaacaataggaggggagcctgggtctccatatcccaccctggtctgcctacttctgggctttccatgagaaagacacacaattctccctgctttaggctgttatttccttgggtctctcttaactgttgccagacttagtcgaaagaggtttataccacatcctattgcatcttcagtacctggtgctgtgccaaacacatagtagttacttaattaatgtttgctaatttactgcaaaaggatagcaaaagttaaaaaaaaaaaggaaaaaaagctttatggaatattaccttcaaatccatcctgctccacatggttaccaaatctctttccaggataataaaatcttaacattttaggcatacaatttggccttcaaaggcctctcagctttttaaatctaatttctattctaatttattcatcatgatgttaataagatgtttggtttttcatgtagaaggaaaagcaaatttatacaatgattccatggatagtcaagagacagaaggcctgtaattgactataataatagatctcacaaaatcataaaactgatagtaacaatggggttcaagcaattaaacaattttgattccacagatgaaaaagctgatgttcagagaggtgacacaactaattccaggccacacaaacattgaatggcagatctgatgtcagaacccagataatctaacttccaacttggtactctcagaatcagttagagtgcctttggttgtcaagagcagactaactaacataagcaaaaatccttttaaaatcttagaatttacaggatccaaagcctggaacaggcaggaaccaggcagctctgttcctgcctggtttccatggcaacatcagctacagagctcatactgatttagctgacggaatgaatgaataaactccaacaacggttattgttctgtttttcattctgattgtagaatgcttctttttcttttcttttctttctctttctttcttcctttatttttctttcttcctttcccttttctctcttttttcttttttctcattctctctttctttctctttctctctctctttctttctctctctctttctctctttccttctctctctcccttcctttcctttccttctctttctctctctctctctctcttcactcctttccaccattatttttgcttactgaatctgcttcccagaacagtggctgatgagaagcctaggcaccaattttctcattcccatttccctcaacctaatatagggagtgagatacaagggtgaacccctaggagatgcactttgagagagagagagagagagagagaaagacagacagagacagaggagaggagagagtaagagttagctctctggctttcctggcttcctctcattttctgtttttatatgcattttatttgttcacatgtttttaaagtctgcagtttgagaccatgagatgacaaggagagaactgaaagccaaacttttgagaatacttaagagaaagttaccaagtgcctgagtcttctatgatatcactgagcaaatgacgacctccgccccccatattttagaaacaaataactgaatgcatgaataccgtaaaggaagatgagtacatacatgtaagcacttagagaaatgagaaaccaccttgtatttttatctggaaactaataaaaagcaaaatgcatccaggaatattatacgacatgcaatttcgcaattcaaggtttttctctttcagtgtgtagagttagccataaagcaaattgacagatactgaatgacctagttaaatcttccacggatgctaatatctcctgttaacaccctgcagcttgaccctaaggacttccgcgcacccatcacatgtatagtatggtgtttatttcttgattttatatttttaatatataaacacattggttatggacaggaaagaccttctgtcttattaaatgactcacatgatttgcctcgaaaccacaagctaagtcaaacttgtgctaagcatggtttaatctgacagaatataaagattctaggacaaatcaaacccaagtgaaagtttccagttttattgccacacccaagttcgataaagaagcaatatgagcttgaattaaacttgcagccgagaaaggttacaacttgaatatagtattgagcagaaagaaaactttccatggatcaaggactcaacataattctaggatctataaaaaaaatatccatctgatcttcaatgtgtgtacattctaggagtaaaacctatgctttgttaatattacaaagtaaagcaatcttctttcttcccaacagcattgctttgcccattttagtctgttatgtagcattatccatgaagagcacgacaagggaaatgtacagcgagcccttgttaatggtcttcggagaaaatggtttaattgcacagacaaatgctgagtcaaaggtgattgtgcaagccagagaaggaagaaaagaaaatattttttaaaattagccaataatccatttataaggacaacaaacaatagaagcttaatgactttttgccatattactaaaacatgtaagaattacacgtgacttctggaacacaaaattcttaatcccaggtcagaatagttaattcaaaactaatttgttttcagggaacatatctgagaaataataaaatgtagggtctcagctcacatccacccttgctcagatgaatgatcataaaaatggtcctaggcaaggccacagggtctggctggctgaggactttgtgcactggaccatataccatgagcagtgagttatttcaaactccagctatggggccagaaactccttaggagtccgcaccagaatgtctagaggagcacgtatattaacaagcatattttacacttaaaaaaaaaattaaccacagaaactgagattccaccagacttccttgataggaagataaattgtaaaagttttactgaaggacttaatttttaaaattaagccatttaatttaaaaaaataagacttttaaaacaatgttgagaaacacacccttcaccagaagaagaaaggggcgtggccagggaagcagagcagttccgcctgtacctggtttatgcagtgcacttctgaatattgccttcgaggaaaggttaggacaggataaagcctccagacaccaccgttcgagtataatttgagccaggaaagctgtcagtgcagctttttactgtgttgtagaatcctttgggaaagaaatcttttcttgggttcctctgagaattccgactgaggcaaaaccagatttatcagggattttgcagatatcctgaaacaaaccgtctctcagcgtgagtctaaaactccatccgccaagaccgtcgctgggactaagccctgaagctgagtgatcacttgcttcctctgctcctctctcgtaagaattccttccctcaaaggcctcacaggctagatagggaggcagacacaccagagaaacaacagtgaagcatgcaaagtgctgtgaggaagtgttgtgcaggtattgtagaagctcagattgggagtgcctagggctgaccgacccagacagtcttttatactgggcatgtgtgtgtgtacatgcatatagaaatttggggaggagaagaaaaagaaataaaaggaagtaatagtggctgcaacttctgcctacagatactatgaccttgtatagataatgcttttgtgactatgacttggccttgcttgcaacccaccatctgagtcctgctaaccgaggaccaactatttaggaacaagctacactgtgccaccaaaacagacatcaacaacacctttattacatacacaattgccccaagaatttttatatatactattttcctttgcagcaactttactcaccctctctctcttttttcttttaaaatttttagaggagtttcactctgtcacccagggctggagtgcagtggtacaattatagctcaccgtagcctcgaactcctggggtcaagtgatcctcctgcctcggcctcctgagtggctaggattacacatgtgtgtcaccaggcccggctactaagctactaaccctctcttaaatacaagctactaaatctattgaatgatccgggaagaaacaatatgaaaaataaaaagataattaagaatttcacaaagcaaatatatgtataatgtctagaagaatcaaagatggaaagataatatggtaatatgacactaaagagcctgatgaactttttgatttgttataaaacatttaaaaattttccttcaatatttaattggccaatgagtctccaaatagctattgcctctctctcttttttttttttttttttttgagatacagtctcgctctgttgcccaggctggagtgccctggtgcgatctcggctcactgcaacctccgcctcccgggttcaagctattctcctgcctcagccttctgagcagctgggactacaggtgtgtgccaccacgcccggctaattttgtgtatttttagtagagacgggtttcatcatgttagccaggatgttctcgatctccggacctcgtgacctgcctcccacggcctcacaaagtgctgggattacaggtgtgagccaccgcgcccggccatccctctctctaactcttaatccacattgccatgcattggttccctgctattaacctctttggttctaatctagatgatggcatctgctggtcagtgtcctggtccaatgtggatcccatccagcatgctctccaccttacatgcagagcagtctttgtaaatcacaaatctcatcatgtccccccttcactcaaatgcttagatacagcctttcaggataaagtccaaactttttagccgtctataatctgactcttttcttgttacttgctcaatttgggacatgtactctggacaaatgaactgtgtcataccccaagcacgccatggtcttgtgtgccttcatcttttttactctccactccttaccagggatgaactgcctcccattctcagtctagatccgtggttctcaaggttctcaagggaacagtggcgacagcagcaaacgggacatgtcagaaatgcaaatgatcaggcttcatctcagatctcctgagtcagaaattctggagaatggaccagcaatctgcaaataaggactatagaagatcttataccacagaaaagctaggcagcgtgcagagaactagagggccatcgatgacttctttgcctgcagttcagcaaatacacagcagaagtgaagaccactaggtcacttggtcaagctattcataaaacagaagtggctcaaggagaataaatggattatacgcagggacccctgtagcttgaggagtcagatagacattatagaaacagagactgtcagtgtcccaggggtccaggaggtcaaatagtccagtctcatcatgtcacagaggataaacaggagtcctggaaaggtgaaatgacttactcagtgtgagacagatggccaagagaacactgaaaccaaagtgttttagaaggaaaaagctgcatggtaaaaacagctgagtcatctgatggacactgacacaggcaagtccctcggtgggcacccaggcagaatgagaagcatgacatgtttgttcttaataactcagtgggctgatcctgcagtctaggcaccctgctgacgggaagaagcaacgactcagttagactcacgtggatctgtccagcactggacgtcagcagtagataggtttgatggagctggaaagtttatcctttaaaaatggccacaaatattacacttataaatatgtatgtgtgtgggtgtagaaacattacttgtaaaaaatgaaacctgttagattagatcaaactaggttgccgcttctaaggtagtgaacgtgtaaaagagtaaacctcatagaaacatgaggctgcccaatgcatgtgtacatgttggtgttgtgtgcatatacttcatcatatacatatagttagaaattgtatgtataattaaaaatataatcattcaatcataacattaaacagtgaaattattacatcataatgttaatcataacatggagcaattaaactacagtgttttatgacatatagttttaaattataacattaaaaatataggtaaacggctaggatcggggagcaaatattaaagtaaataaatccctgccctactccctgagccctttctgctcatattttgcactcttctgaggactgatgttggcctcccaggcttcaggacaacctgacatcaagatgcctttaggttctttctgacagctgctgctgcttcttcatcacagagagttcatttgctctcctcggcaggccagagctaattaagaagagaacagcccaggttcaccctcccaaccctcctcatcggctagaactgcctgtttgctgccctccaggtcttctgcagtgagaccccctgcttttctccagagagtgaggaaaccaccactagaggggtggggtctcaacacagacatatttacccaacaggagcagaatgtttccatttgacaattccactacaagaagcaggccttcttggacctcttgcccaacttctggccttctgattctaagtagaagttgtcatttttctatgactactattaggttggtgcaaatgtaattgtggtttttgcaatgaaaagtaatgacaaaaaccacaattacttttgcaccaactagtgctagcaatgccttaaaaaataaattgggctcaagatttcttggggcataaattgttttgtgctgttttccgtttcatctccatgttccacgggcttaaacaccacagagcaaaggcagcacgtgtctgtggagctgccccctttccaaggaagctgctttgaccttcaccttctgcctcctggtagtgtgtgatgatcacatggaatagtaaccagagctgtgtcacacttcacaaaacaccttggggattttgtgacctcaaagtattctcttcacctggcaggtggcatgagccatgggagatcccgacactcccaactttgctaccaatgactcagatagagggacacatgtatacatgtgtctgtgcacattaatggaccagcactggccatgtttctatgaggccttttcttttacatgattaccatttaagaagcagcaggtgaatctaacctattttgttttcttacaagtaatactgtgttcgctttttgaaatttcttttctgaactttagtaaaaccatttgctactctttcactctctttttgtgtttttttttttaatttttaattttgattttcataggttttgggaaacaggtggtatttggttacatgagtaagttctttagtggtgattcatgacattttggtgcacccatcacccaagcagtatacactgaacccaatttgtagtcttttatcccctactgccccccaccctttcccctgagtccccaaagtccactgtatcattcttaggcctttgcgtccttatagcttagctcccacttataagtaagaacacacaatgttcggctttccatccctcagttactttatttagaatatggtctccaataccatccaggttgctgctgctgcaaatgccattattccgttcctttctatggatgagtagatagatagatagatagatagatagatagatagatagatagatacaatttctttatccacttgttgattgataggcatttgggttggttccacattttttgcagttgtgaactgtgctgctataaacatgtgtgtacaagtatctttctcgtataatgacttcttttcctctgggtagataagcagtagtaggattgctggattcaatggtagttctacttttagttctttaaggaatctccacactgttttccatagtggttgtactggtttacattcccaccagtagtgtagaaggtttccctttttaccacatccctgccaacatctattattttttgattttctgattatggccattcttgcagaaggagtaaggtggtatcacacggtggctctgatttgtatttccctgatcattagtgatgttgaggatttttttcatatgtttcttggccattttcacatcttcttttgagaattgtctattcatgtccttagttcactttttgatgagattgtttgttttttcttcctgatttttggagttccttgtacattctggatattagtcctttgtcagatgtatagattatgaagattttctcccactctgtgggttgtctgtttatactgctgattatttcttctgctgggcagatttttttagtttaattaagtcccatctatttatctctgtttttattgcatttgcttttgtttttgtgtgtgtcttttgtttttctcctctcccactcttatccccaacccaactttgatttctctctttattctctagaacgtgaattaaccagcagcctgcatttcacatttaactgaagaagcagaattgatgagtgtcacctgaactatcttgaacatttcatgtcacattgcatgtcagatatttaatcttgacacctcctctccgtccagagccaaaaagtcaccaggaatgaagaattctttcttcatcatatagaattttgtaggccatggaaagcaatctagacattattctaagtgctatagaaaactgtgtttgagttttgagcaggaaagtgatatgatttgaattctacttaaaaactcaggctgggaaatagaagaatgaaagcaaagagaccagtaagaggatttattgcaagaatgaaaggatcacatgactatgggggagagaaatggatgaatttgggatatattttgtgtgcagccaacaagacaaaaattaatgcttgcaaggaggggaaaagaggcatgaagggaaagagatggatcaaagaagattcataggcttttacttgagcaactaaatccttgcagctgccctttaacaaaatagggtacagagggataaaggaaatttggagagagaaggaataaaaagttctattttggccacattatgtttcagatacctactaaacacacaaatagaaacgaaggaaagtggtcaccttattttaatgggaaggcagcaacctgaaaacctagtcatcctggagcatccagcagagaaaatttctattgcaagaagtaaacacttgattttgccttccagacagatcatttcattattcaaagaacattttttttcagaaggaccatgagatatgcaaatatatagcagagatttttcagggtacacaggtgttagaagctaaaagtagtggagcaaggtgacaaaaaagagatcctttctagcgggcagtgaaatgcctatatattattttctttagagcaagattccctttccaagtatgaacttaaactgacctatccaggtacatattattattttcttagaaaatgtgtgtgtgtgtgtacacagcaaaagaaactaccatcagagtgaacaggcaacctacagaatgggagaaaatttttgcaatctactcatctgacaaagggctaatatccagaatctacaatgaactcaaacaaatttacaagaaaaaaacaaacaaccccaccaaaaagtgggcaaaggatatgaacaggcacttctcaaaagaagacatttatgcagccaaaagacacatgaaaaaatgctcatcaccactggccatcagagaaatgcaaatcaaaaccacagtgagatatcatctcaccagttagaatggcgatcattaaaaagtcaggaaacaacaggtgctggagaggatgtggagaaataggaacacttttacactattggtgggactgtaaactagttcaaccattgtggaagtcagtgtggcgattcctcaaggatctagaactagaaataccatttgacccagaaatcccattactgggtatatacgcaaaggattataaatcatgctgctctaaagacacacgcacacatatgtttattgtggcactattcacaatagcaaagacttggaaccaagccaaatgtccaacaatgatagactggattaagaaaatgtggcacatatacaccatggaatactatgcagccataaaaaatgatgagttcatgtcctttgtagggacatggatgaagctggaaaccattattctcagcaaactatcgcaaggacaaaaaaaccaagcaccgcatgttctcactcataggtgggaattgaacaatgagaacatatggacacaggaaggggaacatcacacaccagggcctgttgtaggttggggggaggggggagggatagcattaggagatatacctaatgttaaatgacgagttaatgggtgcagcacaccagcatggcacatgtatacatatgtaactaacctgcacgttgtgcacatgtaccctaaaacttaaataataataaaaaagaaagaaagttggacttaagaactgtaaaaatgcaaggtgatataatttggatttgtgtccccacccaaatctcacatcaaattataatccccagtattggaggaggggcctggtgggaggtgattggatcatgaggatgctttcttatggtttcgcactatccccctagtgctgtcttatgacagagttctcaagagatctgcttgtttaaaagtgtatagcacctccccacacccccctcctcttgctcctgccgtgtaagtgtgctcacttccccttcgccttccaccatgattgtaagttttggtgatgcctccccagaagcagaagcttgcacagcctgcagaaccatatgccaattaaacctcttttccttataaaaaaaaaaaaaaagaaaacgtgtgtgtgttcaggcctggcacagtggctcacgcctataatcccagcactttgggaggtcgaggtgggcagatcatgaggtcaggagttcaagaccagcctgaccaacatggtgaaaccccatctcgactaaaaatacaaaaattagccaggcgtagtggcaagtgcctgtaatcctagctactcgggaggctgaggcaggagaattacttgaatctgggaggcagaggttgcggtaagctgagatggtgccactgcactccagcctgggcaacacagcgagactccacctcaaaaaacaaacaaacaggcaggacgcggtggctcatgcctgtaatcccagcactttgggaggccgaggtgggtggatcatgaggtcaggagatcaagaccatcctggctaacatggtgaaaccccgtctctactaaaaacacaaaaaattagccaggcgtggtggcgggcgcctgtagtcccagctactcggaaggctgaggcaggagaatggcgtgaacctgggaggtggagcttgcaatgagctgagaccacgccactgccctccagcctgggggacagagcgagactctgtctcaaaaataaataaataaaaaaccgaaacgtgtgtgtgtctgtgatgatggggtgtggatgaagactgggcaagctatctcaaaggcaatcagaaattgacattccccccaaaatccaaaaatagcaggaaaggtatgtaggccacagagtctgcttgagggtgagatataattatagaagggaaggaaacctggactgataaatctatctgtctttttccacttgtcatatatataccaatgcttcactactaaggtagtgaaccgtgatagagcatggttgtgaaattgaaatcctgggaccagaccatgtccctgcgggtagaaggtaaaattccttccaaaggaagtagatatttttactgtctgtgttccaatggagagatccattccagtactaatacgaagtttaagaaggcatgtgttaaactagaaaaaactgaagatgaaaagaacacagcttcctcctaagagacttagaggaagcatggctctggatttcgattgagtactatctacctgtgagtagtccttcgggggtaggcaaagtggattctgcaataaggcattaggccagaagctaagggtctgggtatgttggctttaatagttaccatatctagttgctattataaattgtcctctttgttgtttttttttctattattgaacacactgtaaatcttgtagaattagaggcccatgcttggatgaaacatcatgggggagagcagtagcagtccaaagggagccatttcaggaagtaggggatacatgaacgtcagctgtggcccttgcgcagaactgagagtgctggctagctgaggaacacagcagcaagggaaggaattagtttaacagttaccatctcctagaaactcccagaaatacacagaaagaaaattttgcaaaagactaaaattactgcattcaagcaggagggaggctgggaccattgtacatatgttctttaaaagggaatatgttctcattttatctaaaaatgagacacacctggcacatttgtctgtctccttctgtaggctataagctctttcaaaacaaggacctatcatgtcagaaagacttaataattatttacaaacgaaagaataagggtatccttgaatcaagcctttaatttgaataactcgattggttttacagtagcaccaagttctacttcctcatttacacattgtgaattacaatgctattattatttggaagtaatggcttttaaatgagcctggagttgaaatcgtaggaagaaagtagttctgtgtatgtaaattatttggttgatgaagggggcctgccgctccacacctgtgggtatttcttgcaaggtggagacgagagactgaggggagtctgatctctctttcccccacaggttgaaagagatggttgcatgctgttgttctttaccaataatgccagggataactagccacggagggtcaaagggtagtaaggctttgtaacaactttcttaatgcaatgcaatcatacaggtggtatgcatggccaccaaggagatgcagattggatttaactagaataacctggggactaaccaaggttccttttctcaactaaaaaaaaaaataggtatagtgatgctaaatctctaaatactcttagaaagattaagaaaataattataagatatatgtcctcatgatggaattaaaaatgaatgtattaatgtcttgtattggtagatttgttttatgacccagcatgtaggctttcctgataaatgcttcacgtacacataaaatgagtatgtaatctgcagtaattggatgatgtaaataactctctatatggtcaagctgatggatagtgtttcttgagttttctgtatcttcactaatggtccatcacttgttctgtaaattactgagagaagaatgttaaaatgtccaaatatctttgtgaaggtatatctttctccctttctgtcactttttgcttcatggatactgaaggtatgttattaggtgcataaacatttaggattgcgaatcattatgattttaccctttttatgtctaataagacttcttgtcttgaagcctattttgatatttatacaaccatgtgcaccttcttgtggttagtgtttgcaatgatgtgtatttttccatgaatttactttcaattttttaattgctgtgcatctttatatttaaattatatatgtgcagaatcctatggctgggtcctgttgtagatatatatacatatatatatatacgtatatatatgtatatatacatacatacatatgtatatatatatacatatatatataatcaaataatctctgccttttggaaaaatatattttggtcgtttacatttaatgtaagtattgatatgactgtggttcagtctcccatcttgctggcttttttaatatttggcatctctgatcttcgttactttgtcccttatctcttcctcatttcctgtgttcttttgtgtgaagcagtattttttttaaaatttcttctatctcctccactgcattttaagctacatctctttgtatttttaaattcattcctagagtgaacatatgcatccttaaagtgtcacaatctactttgagcaccaatactaaatgttagggattcaaacacgagcaaggcatatccctccttttcggatgagtggagaaggcagacatgtaagtaataaatacagcaaaacctctcactattcagaggacctttaacatggccacaaggctcaagcttatcattcgacgaacttgctaccagtatttcttggttgtacagattattttttcctcttcgctcactggatttcatatttgtctgaaaacatttcgccctgtttttaactaaattgtgttgtcatttgtatagtctatatacaagtgctttgttggatatgtattttgaaaagattttctcccaatctatatcttgtcttttcatcctcttcacagggtcttccacagagcaaaagtttctaattttcgtgaggtataacttattgattttttttggtttatagattgtgcttttcatgttgcatgcaggaaaactttgtgaaacctaaggactctaagattttcttctatagttttatagtttcaggtttcgattttcactatatgattcactttgagtcaatttttgtatgtggtttatggtaaaggtcaagatttttttttttttggcatttgactatacctaatttatcctttccccattgaattgtcctagcattttgtcaaaagtcattgctcatatatgtcatctatttctagactactgttcccttgaaatattggtctatttttatgccaatactacactgttttgcttactttacaataagtcctgaaatcagtagtataaattccttaactttgacgtctgttttcaaaattattttggcaattccagacctttttcatttccatataaattttataatcaatttgtcaggttctacgaaaaagcctgctgagatttcaattgagattgcaatgaatctatagatcttttgggggagcactgacatactaatcatatcacctcttctgaacatatgcattcattatgatctagcaatctctttctaagtatgtcttagaaactcttggacaagtgaacaaggaaatatacacaaggatgcttctagtactgctgcttgtaacagaaagacaccagaacattttccttatcacttgagaagatagaaaaatggtggcatatttatacagaaaaaaattttggaatttcatgtggcagttaacaatgaattgactcataaacataacagttacattttaaaaaaggaatatatatagtattatcctatcaatattacattaagaaatatgtaaaaccaatcacatgttgtttgagaaagcaaatatatgtgttaagactatacagaagaattaggaaattataaatacaaagttcataataaaattcataatgagctttttacaggatggggaaagcaataaccttgggagggccacaaagttgtatttcttaatcttgatggtgagtacacagaatgttatcaaagtgttattctatacagcatatatgtattttagtatatccttttctatttaatatttaatatctaaatcatttttaaaaggaaagacagagaattttatcgagggggaggaatcagagtaaacttaaatcttacactagtgaaacagggcacaagcatttatggttcaattgtgtaatcgattcttcatttatactattccatttgcagcttatgaactgcaaaacagcatcctgaataaatactaggagtcgccaatgtaaacctgttaatattgtgggatttttttttttttggacactcaccttctgcaaagtaacaaaagcactttaaaatgtgagaataaatgttgttgattgcagaagaataccagggaaaatagcacaggccatgcctttctctcttactcctcctattgggtctgcaggcctttcgcttgcatgagtcatccatactcaggtaagcactgtgcctttattctttattgcactaggcctcttgacaaatgactgtttaaggagtgtttgcacacctgtcaatggttcctgtcatttgtcaagtaacaaatataaaatctgataactaaacaggagaaaacctgtataaaccaagaaatattggtaccataagaagttcaacagatgataaggctaagccctgtggctctctggaagcccctccgaatagtgagtggttctgctgtatttgttatttatgtgtttgtctcctctgctcatttaaaaagtagggactatgccttgctcatctttaaatccctaacacttagcattggtgctcagtaagtgtccttaattgatggaaactgatatctgttgatcccaaataaaaacaggtcaaagccatctttcacggcatattttcaaaccttctgttttcgcattaaatcgtgaaccttttgaaagtatctacacacttttaaaatattttggaggcattattcaaataactattttgatactgagaaaatactaccagtggcatagatacaaattaactcctggatgcttttaactaatttttgtgtttggtgctaatgaaaaagtacctgaagcctttaactttgaagcccgggcttcaaagacatgattgctcagatgtcttgctttattgttgcagtttagcaagacaagaaactctcccaaaatgtcttactattatgtactcactgtagagaaaatatgattgtgaggaagaaaagtaaagaaggaaagcagtgtgagagttaagcacttgaagtttgcctggagtgaagaaggtcctaccagttaagtgctttggattttttcttttttcttttctttctttcttttcttttttttttccagatggagtcctgctcgattgcccaggctggagtgcaatggcgcgagcttggctcactgcaacctccttctcccaggttcaagcaattctcctgcctcaacctcccgagcagctgggattacaagcgcttgccaccacgcccagctaatttttgtacttttagtagagacggggtttcatcaccttcaccaggctggtcttgaactcctgacctcaggtgatctgcccacctcagcctcccaaattgctgagattacaggtgtgagccaccacgcctggctgggattttttcaagaatgtgtactcaaggtccaaacttttagatcatttgaaggaaatccttttgccactctcaggtaaatcactttggagctctgtaaagagtaaaacagccctccgcagccacacacagatttgcatggtggggctgcggagcctcggagtccaagcgtgacttatagtccctcataagcagaggccaagaagaggccagcttttggctttttctttctttctttttcttttttttttttgagacagagtctcactctgtcacccaggctggagtgcaatggtgtgacctcggctcactgcaacctccacctcccaggttcaagcaattctcctgcctcagcctcccaagtagctgggattacaggcgcccaccaccactcctggctaatgtttgtatttttagtagagatggggtttcgccatgttgaccaggctggtcttgaactcttgacctcaggtgatctacctgccttggcctcccaaagtgttgggattacaggcgtgagccacagcgccggaccttgactttctttcttgataactgtaaaagcaactgaaacagatgatgaaagaagaactcactaccatgagccagagcccatagttctcaataactcaccttgcccctgagctgacaccctcccacaccctgcaacaaatacatgtggttttctttctttgagaaacatcactatatttgggcaacatgtcacacacagcccagtgtattctcggtttcccaagtaacctgtagagaaattctatgatgtgatgccctttttcctggaggaccatagaattcagagggagaggaggccttgagaccatcctcaggtctcctgcctgaatgttgctaagcctcaggactccctccacccacatgcaaccacacatagcttttacaaataaattaagagtaagtcttttgcgggtaggtattatggcattttcacctcctctaggcagaagtagtgtggtgcatttttaaggaaggggaggttgctttgcacaggcctggaggcagaagatctagtcatccatatctccccaaagcacactgccccccttatcctcggacttgcttctaagatttgctgtcttgctgagaagttagcagtactcatcctctgaagatgctagactttccagatatttggggaaagccaatgtaatacatagcaccctaggtcagaagtgtgccttgagacagagttctacagtgattacatattttcttcctagtctgagcagccacatatcaactatcaagaaggtttctaccctattcttgatgctatgcctatgcagtttaactccagaatttatgaagacacataatactgttgacagattggatgagaaccattatcatttccccagattatcgacatgtagcatgctattagtaggagacaagcagtagattatgatgtcagtctgtttatgtgtcttctcactaagagaggtgagaaataaaagccagtggggatagaagactggttttggtctggcttaaacctccatactgtggggttttattctacgtagtttgctgtaaacgtgtgcccacttcttccttcttgagggctcccaggtggccatagatctctgtgacatgaagcttctttggagtattctgatgataaaagggagaatttcaattccatttgacaggaagagtcactccctccttgaagtggaaatgaaaatggatccctaactgtgcaagaggcaacgatgaaatagctctccctctgaccctccattaaatgacagcaggcagtagaattattatttggtactttatgcccaccgttgtgtcagctgtacacatgggccaaccacacatttctctccttccataattctgactcatgctgcatgggcttgagaacaatgttgaaaagttcccccagggtttctgatttacagtcccctcccttttccctggtattcaactaatgatttagaagctggaagtagaggaggctcttcttatttctgtcaaagagacagaaaaagagcagtcagagacagactaagaaatcatgattctaggaatggaatgtcccattctagaaggacagtgttcaatgtggtgaagaaattgaggaggagagcagtaggcagaggttattggttttgatggtgatagattctgttaagaaattagtggtaaaatcctggctaacacgatgaaacaccatctccactaaaaatacaaaaaattagttggatgtagtggtgggcgcctgtagtcccagctactgggaagactgaggcaggagaatggcacaaacccgggaggtggggcttgcagtgagccaagatggcgccactgcacccagcctgggcaacagagcaagactccatctcaaaaaaaaaaaaaaaaaagaaagaaagaaattagtggtgaagccatgctgtaaaggggttagaagaatatgggagtagtttgaagatgtggcaaggtcatgtttgtgaacaatggaattcacagagaagaaattttcttgagctgtgatttagtcagattgggatgctagaataccacagactgggtggcttaaacaacaaaatttatttttcacggttctggaggctggaaagtccaaggtcaaggtgccatcatggctcttcctggtttgcaaatggcgtcttcttgtggtgccctcacatgctggacagacaaagagctctggttccttcatcttctaaggatactaatcccatgacctcatccaaactcaattaccttccaaaggtcttacctccaaataacatcacctcggggataacggtttcaacatataaattttggaggagacacaaacattcagtccatagaaagattttttttgaggtttcaattgtataattcttatgaataagttacaagatgtcaactatttattctcagaataatgtttaactgagtaaattgcaaatctataatgatatagtaaaaaccacattgtctgggattttaccacctggaaagtgctagatatcaacacttctgacatttcccaagaaatatttaatttattcctgaggctgatgccaaaagtcaccaactctatgctgaaacacccactacatagcatcacagaatttcagaactgggcaagtatcccatccaaccaactatccttctacagatggagaaacataggcctcatggagaatagaagatgactgttgaagtcctttctaaccctgaagatatataatctcagaaactagcttgctaaagttcatactattcttttaaataagtgaacaccattctctgatcctgattatgtcattactagtgggcaactattgttttttaattcatctgagtgataaatgtgaaatagtacaagcagactatcgccagttctgaatcagctgagtcctaatttatgaggtataaataaatgtattttgagcttctcctgggaatgagagcctatctataatgtttcaatcctgaaaccaggttttatagaagagagactggcattaatcatcacctaaaatccttccaactcatcattgacaggtgtagttagtgatacccatggcttttacacaatgttgtttaaccaggaccaaatagaattctaggaactgattgtccatgacaggaaatcctacctaaacaaaaggcattctaagctcacacagaaaaatgagcaggcctgaacttgagggaacacaagaatgacaacaattgctacatttaaaccaagtgaggggggtaaagagaaactgctgtcagcatttagggagcccaccatcctggttgaagcagacagggcttgattcctgagagatctgcaatgtgcttccttctttagataaatgtggagagaattctgcattcatatgcaactggaattctgaattctgcattcgtattcaactggaattcagagaattctgaattcatattcgactggaaatatggtggttcctaccgcgatgtgcttttctaaaactcccaaatgggtgttcactaagtaaacatgcatttcaaagagaacttaggtaattcccttagcaagagaaaccagaaattctgactggggctccacaatatgtttatgaaaataatctatgtttccggaaattttgggacaccagcggtaaagaaagaaataagactgagaagtccttgaaaatgacaaactaaaaagaagagagatctggaacaataataaaactgcacatagatgagggaaagtttcaagatcttttaagataccagttaactaattgggaatccctgttctgtaattctctagccacacctcccccaataaaacaaattcatttcagcaagactgaaccatcaatttcttatttatgtaagaggatatagaaaattagggtgtcaatattttaaaatttatgcataatttaaaattatacattttttaaaaggctctgggtggttgtaaaaatttaaattccctctcaaaagatctttttggaaattattaaaaagactatgctctgaaaaaaatgtttgtcaacacctggcatgatttcaaagagtgatcctgcacagaaaagtaccaaccagctgatatccacagaaacacttcactgtcaatcattgaggatgaggatccaccataactgtgaggtattcctgttggtcacttatttacaatttcttcaagcaactgtcatactcaggtcaggttgccataacaagaataccatagactgggtggctgacacaacagaaatttatgtctcacagttttgaaggctggaaatccaagatcaaggtgttgccatatctggtgtgtggtgaggggccccttcctagctggccaatgactgcattctcgctgtgtcttcacgtggtggagagcacagggagtgagaacaaggtcttgtgtctcttcttataggggcactaatcccaaccaggagggcttcacactcatgatcaatttacctcccaaagaccctacttcttaatatcatctcattttaacacatgagttttggggaggcacaaatgttcagtccatagcaaggatatttgtcaacttctcccgtaggccaagaccccagttattcttaaactaccactagaaatacacacacacacacacacacacacacacacacacacgtgtgtgtatctatatatacatattgtatatatatgtgtatatatgtgtgtgtgtgtatacactatatatattgtgtatatatacagtgtacatatatacacacacacattgcttttctaagactactgtcttagtccatttgggctgctataacaaagtatctgaaaccggataatttataagcaacaggaacttatttctcatagtcctggatggtgggaagtccgagatcaaggtgccagcagattcagtgtctgttgagggtatgatctctacttcatagatgtcacctctttctgtattctctgacagagtcccccaaacccttttataagaaaattaatgccattcataagggtagggccttcatgatctactcaccacctaaaggccctacttcttaatattatcatattggggatcaagtttcaacataaattttggagggacataaacatttaaaccatagaaatcactgtctcctaacagacacttaggaatactttccaaaaaacttaaaccaacctagattgtgccaaaattaaccagtcaatgaaataaaaatttgaaaaaatttgcaacactgtgcccaaaatgtttttatctaatttaaggggaaacaatacatttccctttggggaattaaattctgtccaaagtgtgagtaaaacatcaagttttaattcagaaggccaatggtaaggagattctttctccaccttctcttttctcacctctcattctcctaccctccttgcaagcacacacaaaggaaaaaaaatgtggtctacattgcctcatagataaggaaccagaggcacagagaactgaaatgcttcactgtatttcatgcagaaagtgtttgctagaattagaattcacttttcactctacaagaccaaacacgacatagactatatagttcctttattgtcattgaagatttaaaatctataacacaatgcaggtagaatgatgtaaattatgtaaagatactcatatagtataaaggtattataatatagtatgtagacactatgaattccaacctcctaaaaacttagctctcctgaaaacctcagagtaaagaaaagtctattgactatgtaatgagactatctctgataattcttatatatagtattctggattggcaagaagtttatttctttttttatttcatcacattcatttagatttatggaagctggaaagatttcccttctcttatggaaatggaattaattgcagcacttcaataatctcagtgaaacccatttcccctggggaaatgaggaaagagacctagacttaatgtagataaaacaaattgacatgggacgtgaatgggagagaaatgagaaaaccattctagactaaaggtcttacacatttcaggaacgagaagtaatagagggatttttattggcagaacttattgaatctcataatttataatgtttaaagctactggtgaccttttcaaaagcaattaattcggttacatatttattgggagctacatcaagctttcaggagtcatgcacgcataccaaggtctttaaaggaacagaattaagtagataaaaggaggaaatcataaaatgtaacatcctttcccaggtggccacagcttgttcttattctatgcttctattagtaaagaccaaggtcacacaagtcagaccacttagagtcctaacaaggaacagacacccttgcaggttctaattgaactgatttgggctagaaactctgtgaacatcactgaagcctgaattttaacaagcaaaaattcaggagggaaaaactattcagatggtcttctacgggaggcaaaatacaaggaaacttttctacgccaacgaactttgcctagcaacgtgataattcacagagtattatcctgcaggcttcaaagacaacagacaatcagcctaaaagttacacctttgcttttaaatttcttcatataactaggaatactggtgtaacaatgtcaattacagcagggggccatacttcacaagcaggaaaattgtagagagatacaggtatgcgccccagttcctgcccctccctttcccacaatggaaagaccacctttcacttcttcgctcactccccatacttccagttaatagcatcaatttcaaatactactacaactttctcatgttccaaaaaattgacaagcacatgaacatccgttcaattttctctggcaaatatttatcaagcagcaaataatgtggcactatactagccgtggtattgattaggcattatcctatcttcaagaagttcactagttaatggacctttgggtgtggcatataaaggtatgataagtataagggccaaaaagacaccacaaagaacaaaattaggaacaaattatgtattactggccaggcgcagtggctcacacctgtaatcccagcactttgggaggctgaggcgggtggatcacctgagatcggtagttcgagaccagcctgaccaacatggagaaaccctctactaaaaatacaaaattagtcaagcgtggtggtgcatgcctgtaatctcagctactcgggaggctaaggcaggagaatcactagaacctgggagatggagattgcggtgagctgagattgcgccatcgcactccagcctggacaacaagagcgaaactccgtctcaaaaaaaaaaaaaaaaaatatatatatatatatataattaaaataccaatctaacagcaacaacaatatgttttgatgctcaagaacatgtccaggacaaagcctgcaggacacaaggtccctgtgccacctgcatctgtcactgcatcattggttctcatgacatgttccagcctcaactgatgccactatacttaattggcacagtttaaaattataaaatattagtagtaaaagggaccttagtgaccatctaggcttatttcttcatttcagaatctagcctagagattaaaatgttggtttttatccccataattaatttgttgaatcgtcaagaccagaatgaatgaaagtcatttaccttccagtcctatattctttagctacaccacactgtctgccatccatatggaatttgtcctatacccacccaaattcttactgcttcgtctcagaaagtcttgccttcaccatggaactcttctaaccactgtctctattgatctcactcttctttgagctcctacaacactcacaggctaagccacaattgtcctatcaattactttattgcttctcgtagggaactctcccaagtacacagtaggtcacttgaagatagagactgatcctcaatagtattcttgtgatcctagcttctgtcgggcacagtcaaggcagccctaaatacctgctcagtggctgaatcatcatttaatgtaacctcacctccatttactatattgggtatatcaaatacttgctattacatgaaaaagccatacctgtcttcaaactggcacacctgctttacacagggcagccaatttgtgctttaaaattctaaataaatttagctcaggtgaagataaggaaaaagagtaaggtgtgattcagttgctttttttcacatatttgtttctcagtttttgtgtgtagaccttggataaggcatttaccttcactgaatcttgaactcacctttactataagggtaatattatctactttacaagtacacatgcttattgtgaagattaaagaaaattgtgaatggcaagagcatatcacactaatgcccatgttttccatcctactgctctagcctctaaaacccaaatccatcctttgtctcattctgctaaatcctgggaaggtgctagcagatatctaaggagttggttaaaacagacttaaggtgagactcctccctaagacagttttttcatggacacaggaagaggaacatcacactctggggactgttgtggggtggggggagggggaagggatagcattgggagatatacctaatgctagatgacgagttagtgggtgcagcacaccagcatggcacatgtatacgtatgtaactaacctgcacaatgtgcacatgtaccctaaaacttaaagtataataattaaaaaaaaattaaaacaaaacaaaacaaacaaaaaaaaacaaacaaaaggcagtgtttttaacaaaaggcttcttcgaacctcaaaggattgctgttctcacagattaggacaggcactggggaagagggccctgctggtgcctcaagtcatccccagaagcagtagcctcggagtgtcttggtaagtggatgcggctgggaacagaagtgcatgcagctgggactagaagccctgtgctctagtttcagctcttgctacattttaagttgctcttcttaaaaatgagggcaatgacactttgggaggccgaggcaggtagatcacaaggtcaggagactgagaccatcctggccaacatgggagaaacccagtctctactaaaaaataaaaaaaaaagaaaattagcccggtgtggtggcacgtgcctgtagtctcagctactcgggaggctgaggcaggggaatcacttgaactcgggaggtggaggttgcagtgagccgagatcgtgccattgcactccagcctgggcgacagggtgagactctgtctcaaaaaaaaaaaaaaaaaaaaatgagggcaatgatttagatagtcaccccaatcattccagccctactatcatattctaccccttcataccaagaagacagatgctaaataaggatcaggagccataatgttaattttaaccaaaaaacccatatatattcatctggtgatactagagctgaagaaaaccatgatgattagtaaagcaagaaataaaaaatgtatttccccggattttttatggttggttgtagatagaaaaatgggggaaatttgctgattgagattaaaataataataaatatgtattacatatatactttgtgagtggcccaggaaaaacagattttttgtttgttcattttttaagaacaggtagaaaaaaggatttttttaagtgaaatgaaatttttatcaacaggaagacacaactcatatgtatgtcctcaaagtctcaatttcagaccctcacatgaaaggctgggactgttccaccctaccccattccccattcccccttgcaaggtcttggcgattcacagtgtgccaggcaaggaagagaagaaggcctctctgtatgggtcccaaatactgcagaggctacagaagagatccatgtctctacagctaatacgccattgttgcagttcttaaaataggtagggtcccatttcagctggtggggaccaaggcattctgtgacatttggatgagaattgcaaagtatctcactgtcaatcaagtaaaggaatatttcatcttcatagcatcatatccaaggcagcaacagctttcaagaaaaaagatgccagaagttcatgggcactatcaacaatctcaataagcctcatgagaaagttgtttcacctgtccttaatgcacagttatgtgggaagagagatttgtttgtgagctttgaagcaaaatggaaaattagcttaacctctgcatcaatagttcagaattgtggccacatctcacattgttactattgttcgtagcaacataattataaaatcgcagagtttaaaattttgtgaagactccctaagtgtttatttcccaatttctaaacagagatactgcacttcttcaaaagagtcatggttacgggtagtctctgcttttggtgtttctacctgcatttcactaagaaaatatcacaatacctcatctatttaaaatattatcagccaggcgtggtgattcatgcctgtaattccagcactttgggaggccgaggcgggtggatcacgaggtcaggagttcgagagcagcctggccaacatggtgaaacgccgtctctactaaaaatacaaaaattagccaggcatggtggcggacacctgtaatcccagctactctggaggctagggcaagagaatcccttcaaaccagaaggctgaggttgcagtgagccgagatcacaccactgcactccagcctgggcgaaagagcaaaactctgtctcaaaacaaaacaaacaaacaaaaacaaaaattagccgggcatggtggcatgtacctgtaatcccagctactcaggaggctgaggcaggagaattgcttgaaaccggaaggtagaggttgcagtgacccgagatctcgccactgcaccccagcctgggtgacagagccagactccatctcaaaagaaaaatatatatatatataaaataaaatattatcaatagcttataatgggcacacttcctacaactccatcaatctgctttcagccaacagccctgtctctggggaacatgtagtgcccggttaggaacttatattttgaactgcagtcgctccaaagggtacaactatagcatggtggataaaaccaacagggctcgtctctggagcttctctggcttattttggcaacaggtggacctgtgtggaaaccagtacttattgcattcattattcagcaggcatttatttacagggtgcctggcatatgcaaagtactaaggttatagcagataataaatgataaatgtatgaggtgacagacatgctaagtaccctgacttgatcattatacacaatttatatgcatgaaaacatcaaattggatcccataaatatgtacaattacaatgtgtcaactttaaaaataatcaaatttttaaaaaagagtccaaaatgccggcctcatgaaccttacatttaccaaattgttgcatatcctgacattgcaaactctggggaccagaaagagggaaccaggcctgggtgctcttatatccctggaaacacagcaggaactactcagaagtcacagaacttcatgccagtgattattcaaataaatggcgcctctgtggttttaaatagaaggtagggaaatcactgtcatttccaaattataagaaataattgataatccagaagttgttcatgttgcttaatagtaaccaccgtgcaccaccctgacttactagagctcttaaaacctcatccagtatatagcactattcactgagcaattaatattctaacttatgtttgagtattttttaaatttccaaataatttgaacaaatttctcacaagaacatatctccttttaaaaatatgacattaggccaggcgcagtgactcatgcctgtaattccagcactttgggaggccaaggtgggcagataatttgaggtcaggagttcaagaccagcctggccaacatggtgaaagcccatctctactaaagatacaaaaattagctggctgtggtggcgtgcacctgcaatcccagctacttggaggctgaaacaggaggatcacttgaacctgggaggcggaggttgcagtgagctgagacagtgcctctgcactccagcctgggcaacagagtgagaccctgtctcaaagaaaaaaaaaagacattaattctatgtattgataaaaaaccctgaacgtcatgttttcaagaacactctttctgctcataactagctatgtgactgggctcagggcattcaataacctcagcttcctcagctatgaaatgaatgtattcaggtgaataattatgaagtctccagtaagctacatgatcttttaatgctaaatagatcagtgcagttggtgtggattgactctgccccatgatgcagtaagagatagaaggctaaatgcagtggttggagcagaaaaggaagagacagacataaacacaccaacaggtcaggagatagagggaggacctgtggtatgaaggcctaaaatgaagcctcaatatgatatgtgccttgacatcttggaaaaaacaggagatcctccagcggcctaactgcaagtttccccctccatggggctcccatagatcctggagccaaacaaccctccttattaagaagtgcaggcccagtttctgcttttctctgagtggcggccttcagttcccttccagcccatggagttattcaaataagccagtcacattctcccatggaaccagggttcaacctcttgttactacaaagcctacctcccacatcccctgattgttcaccgtgttcccaagtgcagcctttgtgtggctgttcctgcagtggcctcctcctgtaggctgtgaatgtatgtgattaataaactgctgtcaatgttatctgtccagcggcaggtgccatttactcggccatctccataatccctccctccttcaaccaatgggatgcagagaaggcaatcaaaacaaacttgttcatgggtcaacttgacacacgcagttgattctgagtatatagaaaataataaggtaaatggcctccaagtgagtgcaaggcaacagagagaccaagaagatacagaggaaggtttttctgtaggcaggtggaggacagccacaggaggtgtaggtagccagaggcagtcttatgagatccacatctaaccacaggatgcagcctccaggcaagacggctggggctggggacagggctccaaagtttacataggtcagacaagcaaactaaaggaaggagttggaccaattatccagacaaagactgagccacagagggcagatacaaatgagtcaatagatgctcaatctaaggaaaaaaacagaactttgattactcagattgaatcatgggataaaatattagcagccaagtcaccctgatctcaagttactgcccttttcctcgtccttttttttttttttttttttttttttagacagagttttgctcttgttgcccaggctggaatgcaacggcgcaatctcggctcaacgcaacctccgcctcccgggttcaagcaattctcctgcctcagcctcccgagtagctgggattacaggcatataccaccatgcccagctaattttgtatttttagtagagatggggtttctccatgttggtcaggctggtctcgaactcccgacctcaggtgatccacctacctcggcctcccaaagtgctgggattacaggcataagccaccgcgcctggcctccctgctttttagcattcaagacagacttgtttccagaggctgaatagagctgatctgtccaggaagttttagaagagctcaaggggaattgtgagtcacaaaaaaatcagaacgagggccacttgccattttcatctcattttaatcatgttatttttccaaggattaacaccaaattttcaagactgttattcacctatttttaaaactattttgcagcttctatgtgtagctctggcatcatgccaggtttttgtgattttcaaaataattgggtgcctcattaaatctgttagctaacccccctaagatcatggagttcggtattgccaagatcacacacttattccattctttaatttttgaaagtggcttttatcaggattatcttggttccataattggctaaatctctccattctatttcctttaatttaaaatctctatccagttcttagtctctatagaacacattcactgcttgagcttttccatttggggccaggcctattccacttgtattacctttcctcaatgtattttataaagatttctgggaggtcttccgtagtcttccacactttgtaggactaagatccatatttgaaatattcattcattcaactaacatttacttgtggcacacctaaaacttgctaagcattggatagaaacttcaggaacctagtgaagaatgcagttttattttacagagtgtaaattttccttttggatacaaaaatgtgacaaaaaaatcaaggcaaattctttttcttcctttccctaaaacctcctcggattctggatctaggattgtacttacaagaccaatcctataattcagacatttggcctctgtatgtaccgtgattaagcaagtaaagtctgggtctgcccgagttaaaaccagtgctttactagtcctacaaatccggaaatcattcagattcatttttctttcctggagacctctgccttctaaccacaggtggtctgtacctgtcctcagatgtgccgtgagattgggtgtcttacttcaggatcctagctccgtctctctcagtttctcccacttcccagcgtcttcctcaaaaaaggatgcatacaaggtagatttaggtgctcctggctgcctgagatgtctttgttccttcctcaccttgcatggaggggtctgagtaagtgtagaatcctactttagatgactgcacctgattactcctttgctcttcaggactccgaagggactactccgttgccttctagggtaccaggatgctgcagagaagctggagcccattcctatttccagtgctttgtttggacttattttttctcttcgatgttctaaaaattcacaataatttgcctttttttctctctctttcaatttttggggctggctacttggcagacctttccctctggaagtgcatattctttggtttgaggaattattcttgcattgtttccactgatttctcccccttattatctctctctatacgtagaacttccagtgatcacatgctagagccccccattttcacatcttttctctactctcatcaatttctttgccttttattttactctccaggcaatttcaactttattgttaaattcttctatgtatttttttagcacacatatttttaatttcacatagcactatcctgtcctctgatttctctctttagcatagaatcaatggaatcttccgttatctctccaaggatattaactacgaggtttttgaagcattctttttttctatactttttaatttccctgtttacacttctgaaaatttaacttcagttggtttattttagaatatgcctttccttttagaggttgttctaaaatgtctgattctagaatgtttctaaaacatttgtatttcttgtcattcgtgtttaaaacaaagccattaaaaagctgaccggaccgttgagcacactaggggtcttgctagctggtggaccttaaggttggatgactgggcagtgagagcttttttattgggacacacccaaagtcactgtctagaggacttttctgctttctggtggaaaagaactgcccaagcccacctgccattcagcattctgggagcagagccaggaagagagctgaggcttccataattcagtgcgtagacttcagcttcctctcctgcattcagccctgtctgtctcttcaccctagaacagggtttctcaacctcggcactattggcatcctgggctctagccctgtgggagactgttcggtgcatcgtaggacgtttagcagatctctggcctctacccactacacgccaggagcaccccccaagttgtgccaatgaaaaatgtctctagatatgggccaatgttccctggggtgggctactgccctgcagggtgcttgggctccctgaggtctgagttcttccaactgtttctccagttacaaagttctaaactcttctagaagcaaagggtaggtgtggtttcctgaagctaggagatacgagagggaaagtggggatgtaaatgccacatgtgaagattttcttgcaattttgcctcgtgttatccttgctctctgtggtatctagagcccccagtcatgtgtcattatgggactctaacagttgctgctcaatgatacctgcagacactgagttcagctttgtccctccgctggatcagtctccactcctccaacccctacatattccaaaaatgtgtggacacctctagcccactcctgactcctcacctcttcactattgaccttgtcttttctgtcttttactggcatttacatggacttgtggaagggggcagagagaagccacatgcccaatgccccatgtttaactagaaacctgtactgttactttacaaatgtgattcctcatttattggtttagtacgtgcataatgaatttcttcagtagttattctagagattctgattaattatacagagtgatattgatcacttatatcattttttcttttcccaactcagatcaactatctcatgctcccagattagttttaacagtttaagaagtatggaagagttgacagactcgtgggtctctttttaaaaaaatctcttttgtaaccagcctagacgccttggctgaacacgataggagggctgtggaggtggcataagctctagtccaaggctcccttttgtggaaacgtgggtagacgcctcctggcggatgcctacagcaatacctggagcatgccagcaagtaaaaataaacctggaagagcactgggttcaagcccacgttccgtccatcccagagggccctcgagcaaggcctcctgcccaatcacatgtttttatcataatagattcttccaggtggtaagagcagtaatacaatcatcacacagtttgccaaagcattttccaagaataactgccagaagtgtgcattcagcttgtgtgtccatatgctcctggtaagatttagaaagcagggaaaagggatgagaaaagattaagtcaggaaaattgaaaaagaaggagacaaattgaaaagggaagaaatcgaaaaagaaagaaaggtgattccactgatgagtgggcgatctgctactctttgaaccataaatacatttcctctaactaaatgcatcataggtattctcaattcgatgtattggttttccacaacctaatctatgaattttcaagtgtaattgtacactgctgtctgaacaacacaagagcaagtccttcagcattgtacatagtgtagccatttaggactgtgcactcaaaattggttggcaaacatagggcattatgaggctgaaataactgtagctcactcttcctgaacctcattacttttggcagtgcctctactggtaagtgaaatgagttggatagcacaggagcagatatatgtttttaagaataaactcagggaccttgagtatcacaaaatcttagttaatccacctcttttcctttagaactctgcttcagcctcacccctctgaaagacctggtgccagctctgcccgcctccactggctccatttatcaatgctggcccctgcatccctgatcctctcactaatcctaagcttagagtggcttttcctctcccatggggccaattcctattgaacttcagttagtccaggtggagtggggctctcggtctaggatacaagcaagctcatgcccttggtctgactaacactatattttaaaattggacccaagaaccaatagaaatacattccttccatttaccttgggatgcagaaatactctcttttaatgatcttgaggtcattttgttccttgcattgcaaatcctacaaggataaaacttttatcttaaatctacttacttaaacttctttttttaacaagacaaaatttaagccatattcccatggctgacacaaaaactgaagcggttttctccatcctgatgtccttggaaattgtacttgtaattcagagatcaagtatctgtcttcgtttaaagaaaataagcaccaactggagctctagtaagttttcttttctctctccaggggaggttgttgccctatgtcatgagaaacacagaggacctgacatgtagaatgactatgaagcagtgttcatagaaataaacccccccccctttttttttttcttgagacggagtctcgctctgtcgcccaggctggagtccagttggcgccatcttggttcactgcaagttccgcctcccgggttcacaccattctcctgcctcagcctccccagtagctggggctacaggagcccaccaccacgcccgctaattttttgtatttttagtagagatggggtttcaccgtgttagccaggatggtctcaatctcctgacctcgtgatccgcccgtctcagcctcccaaagtgctgggattccaggtcccatcccttttaatttctgcacgggccctactttaagtatcgctgcagtggcgaaagcattcatcattgccgacctgtgtggaatgtgaacctgagtattttctattggcgggaacttacgtggctaaaacgtctcctttataatgtggagctaaacagttcaaaatcttgaacagatcttatcacccttaaagtattatgtaatatgatcctcacccaagaatgacctccaagtttcctgacatacttgacgggggagactggtgtcacatgaggaccagtaaaaaatctgtactgaactgaaatttttatgcctcaacatttttttacaaaaggaaatcaaatgtgaaaatttatctggatgctccatacttcaaacaattcccattaaatgcattaaggctttccagtggcctcccatagcaggattcctccaacacttctgtgacggttcattttacatgtcaacttgactgtttcacaggagtgcccaggtatctggttaaacattatttttgggtgtgtctgtgagaggctttctggaagaaattagcatttgaatggtggactgagtaaagcagactgcccatcccactgtgggtgtggcttatccaacctgttgagggcctgaacagaacagaaaggtggaagaagtaaggattctctctctgctggagtgcttgagctaggacattggccttggagtgggatttacaccagcatcatttctggttctcaggactctggaatcagactaattacaccaccaacttccctggcctccagcttgcagatagcagattatgggacttaacctccacaatcacacaagccaaatctttataacgtgtgtgtgtgtgtgtgtgtgtgtgtgtgtgtgtgtgtgtgtgtgtgtagacacactattggttctgtttctctggagaaccctgactactagaatttctttttttttttttttatttttattttttgagatggagtctcactctgtcgcacaggctggagtgcagtggcgcaatctcagctcactgcaacctccgcctcccgggttcacgccattctcctgcctcagccttccaagtagctgggactacaggcacccgccaccacgcctggctaattttttgtatttttagtagagatggggtttcaccgtgttagccagggtggtcttgatctcctgacctcgtgatccacccacctcggcctcccaaagtgctgggattacaggcgtgagccactgtgcccggcctgactactagaatttcttataatggcctacccaaggtcacatatgatctcactcctgcagacctccccaaattatttcctacagcttccccctccccagcttcctgctgtcctcaaacatgccaggattactaccaatttagggcttttacacttgtttcttaagcctagagtgccttcaactatattttgtcatggcttttgatttctgctcaaattatggcatctcatatgtgctttccttgaacagccaatctgaaaagaagttcctagccccatctgtatccaggctccctctagctgtttttccagtggttgaggtctttaagtttaatatctctccaaatatttctttcttctcaactcccattttcctctcttctagactccagttacctgtgattagataatttgatattatccacaggtctcaagtagcctttttcattttttcactcttttcctctctattttgcaaattggataatttctattcacttgttcaaatttactaatcccttcctctgctatgccatgtttgctattaaacccatcaaaaaaattctccatttctgatattgtacttttttttccagcacagctgtttgattctctatcatttctatctctctaagatttcctttactttttcactttttcattgtccatttttctgctgatctttaacatatatacatatgtatgtgtgtgtgtctgtgtgtgtgtaatctgtccaataattccatctggtccattccttggtctgcttctgttgactattttctctcttgactttatgtttcttcacataattcatcaatttttattgtggttcagatattataggtaaagtattattacagactaaagtaaataataatgaacccccccccccaaaggatacactccttcttctctcaaggctgagttagctaatctgcagctgagatgtgtctgaacttagtctagctttagttagattcagttgaccactaactataagtttgaagacatgataggactttctctttagcaagattgggtatctgcacattgtcaagactctgaaaatattgttctccttaacagcccagccaccaaacttctaagctctggaaatctctatctacttgtcagtccatctgttagcttttttttttgagggagatggagttctcagggaattgttttttgttcatttgtttgttttgtttgtttgcttggttttggtctagtaccacttctagctttgtgtgcctccaagtagtgctctctcttagcattactgtctgactgccagcctttagggtctctatggtgtgttctgtgaagaccaatattactttggtggaattattctcagctttcctgcccaactctagccctcataggacttctgcagtgtacttggtgaggcctaaagtgcctcaaagggatttctttcctctctcctgctctacccctagacttcagcagccctctgccttgtccttaaaaaaagtccctcatatctcagggtaaattagttcagcaaagctgctctgattccatcatttggcactgtaccctgtgcatttagtgaaggtccctggaaaagagtgggcagacagatgcagacttttgtgtctggagctccttgagattctaatccttcctgccagctcatatgcagccaccaaaagttgggctggtttctcttctcctattagtccaccaagaataaaagcaactgtggatctcttctctcatggaaatgtcttgccactttctggaaattagttaattgtctctttttgcatactcagctctgatgggtttgagatgttacaatgctgtagagtgtctggcttgatattaaggttagagtggaagtgatagtctcttgtacttcctacatctatccagatagaaaagttcccaccacatctttgtcatctttatattttcagcatttgtactggtactagtacttggtagtcactcaataaattttttgttggatatgtaaaaagagaacagtgatattaactagacacctaattggtagtattaaccagacacctaactggtaaaagattagttaaacctaaatatgcccagaattttttgaagaggcaaagattatacaaataaaagaatttttaaagtaatttatagtaatgctgccactctaacacaactatgtacatggaactaatattatttattacgatcttataacactgatgcctatctgaattgtgcagatgaagaaaaataatataatctatgcagatataattatgacattagctgaggcaggaaaagtaaactctaatgtatttaagtggaaaacacacaaattaagttaaaacaaatttttaatggaagagtagaactggttcactattcacgacttttccaggtttaaaatgaatacaattatattactagtaaaacctcattacggcccatggaaatgccctgtggttacactcagtgtttcctcccaatctcatgattgactatggaaaactgcaaatctaggttttccctggttcatatcagcctgagaaattagactgaattatctgtaacatctcccttttaaacatgtgctttcagataacatcacgaccagagtactgacgagatatttccttatccaggacggactgattattcaaattaactttggtagagtaaacatgattctatattatctgaatagctacttggtttaactgacagaaatgaggaacagggtcagaacagtcagtgtactataagtgcacttatggcatcaaataccacaagcaagccaaggctggttcagcaaagcaattttggagacatccctccccataaagcctgaatatagctggcccctgttcagctctggttgggggaaaagtggattattaagaaaacacttcagatgtggccacagccacatattaatagccacagtccagcaataatgctttgacctgaggctgataaaacatggtggagtacctactaatttagattatgagctaagaaagttgtctattttttcactccgaggaaaggtaatatttagtaggaacagtttgtgcaatgagtcattttcatccataaaaatatacactatagcacacccctaacaggatacttgtttagacgttcttagacttggtcgccttggcttccttttggcatcctatggtaggatcctatgacttgattctttagaatcctctatggtaggaaacgttggtgacccttgaggccgtccttctctctctcatagcaattaagatcaactggtagatctttactagtggactcagatgggaaaacaggagttaagggcaggcaggatatttattcatataagcatgtcaaggaacttctttttctaatgattccacagagccctattttgaacaacagctgggagagaatcaagcaagctcttttaacaaggcaggctgcaagcattgccattccaggagacagtttagatgcaactattcactcatctctaaccatcacttgcgtgaacattactcaaagagatacagcaaccaaagaaatcaaaccagtaaaagaaaggtttatttgtttaatagaggtctggcagctgaggcaaaacctaacaataattctgatgaagactcagtcatttatttggagcttctaatgaatctaactaggtaccttatacaggcttgcgtgggttaaatcacagctgtaaagtgccatgctaacagatgagagagtatgtgattgtatcagagatactagggcatccaattatatttatcacctgcctcctattaaagcttttttctgttcttaacgtttgtgttggtagtggcaacatagaggttacagtgagctttgtcctaaagaacctggaaataactgaagtatgagtcagactttaggagatcagctcagaatggatcagagctcagaggaaccttgggacctcattcgtccaatgtcctaatacagatcaacgatcaaaacagtctatcaagggttcagcctaaacacaattaacatggagcaactcttgccattagtatatttagctctcgataaagcctgagaggttaatatgattctagacaaccattcataggcagagatatatcttcctagccaaaaagaaaaaatatagttcttaaagaagagtaggaaatggcttagaagtgatagttttatttccaattctcaattccctgtctcattttgctaaatgggtttaaggagcaacgatgacaatctgctacgatttgcatactcaagcaacactatgaatcactgcaagcatcctcttttgttgcttcattttagcttagtcaacgtccagacaatcagggtgtattgagcatcttctctgataaaagtattttgaagaaaaacaaaagaatggaatgttccttctctcccaagggacttaaaatgtactacctggcatacaagtatttacatcttaaaatgaaaagcagtgaataaaatcatagaccaaaactaatggtgaatttccagcctccagtaaagaatttttcttgaataaacaagtctattttatttcttttcgttctttttaattttaatagtacaggcgacagttaaaaataaaagagagagagaaaggaagagagaaaaaaatggattgattgattcaggtatccttcgtacctctgcccagagacaatgtccatcgtcagcttttaaaatgcatcctaagatgtgcatacaaaatagcatcctactgttttttacttaaaatatatctttacttaaaatacattccagatcactcctgttagcgttgctacatttttaaaatagctatgtactctcctattgtatgcattgctccaatttcttctatttctgctctacataattctcttgaaagaccaaaggctgggctcatctttttcgtcttgttatgcccaatgaattattttttcaatttttgaagtcaaataagtttaccgcaatatatatctgtattttgatctttatgtaaacattagtttggcactcacaatcaagcatgcaggccaggcgtggtggctcacgcctgtaatcccagcactttgggaggccgaggcgggcggatcacgtggtcaggagatcgagaccatcctggctaacatggtgaaaccctgtctctactaaaaatacaaaaaattagccgggcgtagtgatgggcgcctgtagtcccagctactcaggaggctgtggcaggagaatggtgtgaacccaggaggtggagcttgcagtcagccgagatcacgccactgcactccagcctgggcgataaaacgagactccatctcaaaaaaaaaaaaaaatcaagcatgcactttgaacaagccagggtgtaagcattgccatcccaggggatattttagctgtgacttttcactcgtctctaaccatcacttgtgcgtacattactcaaagagatacagcaacagaagaaatcaaaccagtagaagaaagatgcatttgtttagtagaggtctagtagctgaggcaaaacctaccaataattctgaaagagacttagtcatttatttgaaaccttttatgaatcttctggttctgtaaagttttactgagttgcatctttagtttttctccattttgttatttgattctcttcttcaggaatagcaaatatctgtttgtcgattcactttgtcttccatatttaccattgaaaaactcattttaactctttgctcatgttgtctttgttttgcccgctgttctcagtgccgtcacagcgatgcttcctgccatattttcaataatctttaatttcccttgggttatttccaaacaggactttatatttgatgttcgtatttttttcttctacttattgcctgagcttgatcagctcatgtttaatcttcttccattgcttcaccacatttttcatgacctcttatattcatggcttaagtttttgttttctggaaattattgctttctttaaaaaatgaacataagccagtattttaaacacagatattttgcattgggaagattttttagatgcacgttttctatctgccatttatttttgttttttctaatctattctacattacttccctgcaggacctgttctttgttctcctcaccctaccccaccactcaatttatcacttgtctttgcacgaagtgagttgtttcaggcgcagccattgttgttgttagtgaggttctttgcggtgcagagttgggtgaaggcagctacaggaggctcaagggcagatcctccttcaccacagagctcacaactatggcaatggctgtgtcctttctcattcacccaaacccactgagtatcccttttccaccagcccacacacctcaccactgctcccaacaatgggtggttgttttgcccctcctgttgcgccgctagcattgaagatctacgttctgttggctttgtctacgaactgccacgtggcgcatcctgactcggcatctctgcacacctccttttgacttctttcactgcacttgtccactcctgttcagacactgacatttaggatggcacacaccttctagttccactgaaaataaatcttatgtttcctgtttctaatctccttattttctggagaaaagaatggaagcaggatccctttactccaccataaaaggaacacatacccacaactattcatttggggacttccaaccatatacacaccttccccatagttaagtgccactttaagtggttccttcgccattgaagacaatgtgaaaggcagtgtgaaaggcagcaagatctcataaattcttcataacatatataatatatataatataacatataactttataatgtaacataatataattacatagtaatacactggagaacacggaaaagaattaggaaaaaagattttactcctttcagtatccaagagagctcacagagcatcattcaggactcagaaagaggggcagagctcagttacagtgaagaatgggttccccttgattttcctactgtttctatgttctttgagggaaagtaaagaacaaacgtattttgtgtaaacatgctcagtgttgaaattgtatgacaaaaatagtcttctaacaaagataataataacatctgctgagcacttagctatgtatcatgtacctatgtcctatatattttttgtattaaaactttattgtgacataaccatagattggcatgcagctataagatatgatacagagggagcatttgtactctagccaacctcttccaatgctaacatcttgcaaaagtatagtaaaatatcacaaccaggatgctgaaattggcatagtgaagagaatttttccattactacaaagatcccatttattgccttttttatcaccttactcaccttcctctacttcatcccctacatcagtcctaaaaaccactaatctgctttctgtttctataattttgaaatttcaggaattttacacaaatatagaattatatgatatgtaaacttctgagattagttttttcactcagcccaactttctagagattcacccaggctgctgtgtgtatcaacagtttatccctttttatagctagtggtattctatgggaaggaggtaccacagtgtatttaaccaatcccctgtggaagaacatcttaattctttccagtttggggttttttgtgggttgagttgtgcaccaagaatttacacggtgaagttctgattcccagtttctctgagagatcacctcagaacaagatcttacttggaaatagagttgttgcttgtatcattagttgagataatgtcatactgtagttgggtgggcctctaatccaatgtgactggtgtccatataaaaaggggaaatttggacacaggtgggcacacagggaaaatgtcatatgaaaatgaaggcagagatcatggtgatgcacctacaagccaaggaatgcccgtgattgccggatccctccagaggccagaagaggggaatggaacacattcttcctcatggcctgctgatacctcaatctcaggtttctagtctccaaaactatgaggcaatacatttctgttaattaagccacccagtctgctgtactttgtttaagtagttctagcaaatgaacacagaactactgccagtaaagctgccacacatttgtgtacaagtttttggtctttgttttttgagacagggtcttgctctgtcacgtagactgcagtgcagtggtgcaatcacagctcactgcagcctggacctcccatgctaaagcaatcctcctgcctcagcctcctgagtagctgggactacaggtgtacatcaccatgctcggctatttttgtttgtttgtttgatagagacaggatttcactgtgttgcccaggctggtctggaactcctgggctcaaggaatcttcctgcctcagcttcccaaagtgctgggagggattacaagcataagccactgcacctggcatgtgtgcaagactttttgtggatatatgtcttcagttctctgggctaaatgcctaaaggacaaaatgatagttgcaagtttacttttgtaagaaactgccaaactacagctgactcttgaaacacaaggtttttaactattcaggtccatttatatgcagattttttcaataaatatactacaaagtttgttagagatctgtgacaatttcaaagctcacagatgaaccacatagtctagaaatataaaaaaaaataagaaaaagttaggtatgccataaatgcataaaatatatgtagatactagtctactttaacacttactaccataaaatatacacaagtctattaaaaagttgaaatttatcaaaatttgcccacacaaacacttacagatggtacgtggcaccattttcagtcaaaagaaatgtaaacaaacttaaagatgcagtattaaattataattgcataaaatcaactgtactccatactgtactgctgtgataattttgtagccaccttctgttgctattgtggtgagctcaagtgttgtgagtatccacttaaaacgctctttgtccccacacagccagttcgtctctccagtaaattgcctatcacagcaaaaagtgatagtttctggttcttgggtatttttcatcatgtttagtgcaaaccgtaaacgctgaataacaccatgggacccacatgaaatatcactagtgatgccagaagtgctcccaagaagcagagaaaagtcatgtgagttgcttgatatgtaccatagattgaggcctgcagctgcagttgccaaccatttcaaacagacaattcatcttgtaaacagacaacataaacttaaggcattgatatatacagcatggcactgtaaatgtactttttcttaagattttcttagtaacatttccttttctctagcttactttatcataagaatataatatgtattatatatacaaaatatgctttaatcaactatttatgttatgaattgcattcaacttacatgtcagcttggcaagaattgacatcgttactatgttctcaaccaatccacgaacatggcatgtctctccatatatttagttaaacgttcaactacttatgttatcagtaaaacttctggtctattagtagttaagttttgtgagagtcaatagctgtactcatattttcttttgttttccctcaaggagtacatgtgcaagtctgttacatcgataaattatgtgtgctgaggtttggtgtacaaatgatcctgtcacccgagtagtgagcacagtaccctgtaagtaggttttcagtccttgtctctctcccatcctcctcccctaggagtccccagtgcccagtgtctatcattcccatctttatgcccatgcatacaccatgtttagctcccacttataaaggagaatatgcagtattttcttttctgttcctgtattaatttgcttaggataatggcctccagctgcatccatgttgctaaaaaagacaattgtaagtggtatgtatctttaattttggtgtcctcacattcattactataatatagaaataaaattgatttttggatgtgtatcttgggtttcttctttgggttccgtgaccttgctggactcattcgttagttctaagagtttttatgtatatttcttggaattttctacatagacaatcacgtcatctgcaaataaggatctcttcctttctgatcgaaatgtcctttctttttcttatcttattgcactggctaaaacctcaagcactctgttgaataaaagtggtaaggatagacatagttgccttgttcccaacattaggggaaaagcattcagtctttcaccattaataataatgctagctgtagggtttctgtaaatgtcctttattaagttgaagaagttcacttctattcctagtttcttgagagttttttatcataaatgggtgttaaattttgtcacatgcttcttttgtatagattgatagaatcacgagctttttcctctttagctttctaaacaactcctttgtttcctttaactaatatgtgtataaaatttcattttccatccttcacctcctatctgcttatcattatatttgaagtcggttctttatagaagtaatactgttgctttagtttttacattatatgtacataatttatgacaatctactagtgtcatcattttaccagtttgagtgaagtacagaaatcttacctcccttcatgtccttttatcctgtcctttttataaaaagctgtcttaaatatgtcctttatatatatttagagccacatcagacagtgctgtagtttttgcttcaactgtcaaacatatgtagaaaactcaagaggagaaggaaaggttattgtatttaacaatactttcacttactatagtctttgctcctttttcatgttccaaggttctgtcttctatcacttcctttctgtttagagaatttcattcagccattctcttacagcaggtctgctggcagtatattctattagttttcctccatttgagaatgtcttgattcctccttcattcctgaataatatttttgctggatatagtgttctgagttgtcaattcttttcttttagcacttaaaaaatgtgtcatttccttctggcttccaatgtttctgatgaaaaatctaatttttcccccagtaggtaagatgtcactttttaatgaaaatttttaagattttttctttaatattcataagtttaattatggtttgtttgacatcaatttctttgggtttcttctgtgtgaagttcactcagcttcttgaatctgtaggtttaagtcttttgccaaattcgtgaatttttcagtcattatttctttgagtgtttttctatccaacctctttattttcctccttacaggactctaatgacataaatgttagatctttaattgtagtcccacagatctctaagtcttcctatttaatttcagtctatttcctatttttcagattgggtaacttctattgttctatcttccagttcaccaattctttcctgtgccttcttcattccactgatgagccaatccactgagcttttctttggttattgtattttttagtccttagacttacatttggttcttttttgtaccttatatttctttgataagactttgtatttatttactgaggctttctattttctcatttgtttcaagtgtgtttgcattgcttattgaatcatttttttcatggctcctttaaaatctttgtcagataattttagcatctttgttaccttggtgttggcatctattgatggtcttttctcattctttttgagatctttcttgtcctccatataagtgattttcagttgaaacccagaatttttctggtcatatgttatgaaactttgaaacttatttgaaccttatgtattagttggcttttctaatacttctttggcagggaagagaagaggaaccaccccatgactaccagttggaggtagaagtctagttttgcaacatggcctccaatgccacctaggggtggggggagtgtttggcagggggggttgttctggttccctacctggtgttcaatgataccagagtggtgatgtcctccttaacctggcaataaagtcctgactctccactaagtaacaccccaggaacaatggtgaaagtcctgacttttctctgacaaggagagagaatggggcaccttgctactgtcaggtggagattcaagtccagctatccacatggtctctactgacattgtggtggaaagtgaaggaagtctcaatgccagtgacaggaacaaaagtcccagctccctacttggcctctctgacatcaccctagtgagagtgctggggaaccccattatagcttgtgaaggtagaagtctagcctccccactcagcctttgctgatatgggtgggagtgatgctacagttttttctgtagtgtttggctggagtaaagtggttattatccaaaagtttctgtctttctttgtttttttttgtttgtttgtttttgtttttgagatggagtctccctctgtcgcccaggctggagtgcagtggcacgatctcagctcagtgcaagctccgcctcccgggttcacatcattctcctgcctcagcctcccaagtagctgagactacaggcacccaccacaatgcccagctaattttttatatttttagtagagacggggtttcaccatatttgccaggatggtctcgatctcctgacttcgtgatccacccgcctcagcctcccaaagtgctgggattacaggtgtgagccaccgcgcccggccaagtatctgtctttctatgctgccctttttccagggctttgactagagagaccaggcttttgttggggacttgtcttgtctgtgcccattggcattgctgggttgtgggtttcttctactccaaatatgggatatgagtggaaaaaaacacagggaactcattagcatgttattcctcatgtcctgagtccccagctaatctgccttgttctcttcttctttcatggcctccctacatttgttttatgcaatatatacagttttttattgtaattagaggatctaatagaggacgctattcctactccatcttcttggaaacaagagtctgtcttagatattttacacttactcatttaattctcacaataaccttttaaagtagtattattaaggtctcaattttacatttgaggaaactgagttacagagaagttaagtagcttgtctatggtgacatgctaacagcagcaaagccaggtttcaaacccaagaagtcagcctccagagtcagtgctttcaaacagtatactagaactgttttcaagtaataaatgttcacaacgaagctcctcatttgtcttggttggtctctccctgcagggctggactcccgattattgtacaatagttgagagtgccctctgtggaacatagtcctcaggttacacgccccatcttttccccacttcttacccacaagtatatacctagttttaaaggtgcagggttataagcataaaaatgatcagtcatgatcaatcacatcccttatttttgaaaatccatcatgagtgcgcataataacctcaaaatgagagccatgaatgtaatcatcgtccctgtgtttattaatcacatccttttgaattcaacactttttattttctgccaacttcttgctgcattatctacaaggtaatcattctttcaagggatcttctttaagtctcttccattctctcagcctttagcccaagtcacctccatcactttcaataagacttcaccaattctgtaatgttctactacatcaaaagccacagaagcattgagatggaaagagcctttagggaccattttgctggtgataagagaactaagtgacttggacaatgttacactgcttcttcgtgacaaacctgagactagaaaactactacatatgacatcctacacactgactcccttcttcagctctgtctgataaagggatgagagatcgtttcttattattacacatacacgccacttccgttccttccatctaaacctagttcagaaacaccgctaagaattcccacccccaaaaaaatggggatgggggaagagaaggaagtgaacagtggtgtcatcccaccaacaagcctgactgcacaaactatctgcctgttccataacaaagagattatatcaaacctacctccccaggaatcagtctgattcaacctcggaactcctccttctcctttccatttggcccaaactagggtttttctctcaggtcttttgggctttctgaacaagtgccagcaccctgtggcttgctgctgccagcccaactatagtaattttccagaagtctctggttatgccacactgctcaaggaagaggaatatcattaaagtgacttcacagccccataaacatgccacttgcagccctcttattctgtctggtggcctacaccacacactacaatcaacaagggacatctagatttcagggccaaatccctgcaaagactctgtctgaacatacttttgtgaaagcctgcagaatatagatttctgtgtgtcataaggaaataatcggtccttaaatctcaaagtacaactagctgcagtatttaaaaagcccatggacaatgacaaatatagacatcacaaaattattctaaactgatcaatgctgagaaaagtcatgatgtgtcaggagtctcagctccaaaggcagtctgccctttaacataatgaacttcagtaaaagtagaaaccatttctgagggtgtaattgacaagtggcaatgaggtcatcagtagagtttatgacatttaaatccctgtgatatggtttggctgtgtccccacccaaatctcatcttgaattgtagctcccataattcccatgtgttgtgggagggacccagtgggaggtgattgaatcatggaggcgggtctttcctgtgctgttcttgtgatagtgaataagtctcacgagatctgatggttttataaagcggagttcccctacacaagctctctcttgcctgctgtcacttaagacgtgactttgctcctcctttgtcttctgccatgattatgaggcttccccagccatgtggaactgtgagtcaattaaacctctttcctttataaattacccagcctcaggtatgtctttattagcagtgtgaaaacagactaacacgccctggatctacttttcccggttttatttttttgtaacccacaagctgtcctgcctcgtgtaatggtcttaggcaaaggaagacctctctggttatccttaattctatagatacctacttcacacacacacattcaaacacacacatacacacacacacacacgacagagggacttctaagtaaatatcatatacattatgaggaatcaagatcttgcccttttctaaagcaaataactgtcaggcttgggcaaatgcaggggccatattttctaatgaaaaaataaaaatatatgacactggacaaattattgaaaatggaggtatacattataacttcccttactttagcttgctgacaggtaaccttgggctctgccacaaagtaattttcccatctggactaactggggatcagacagaagattctttttctttcaaggtgtcctagaaaattggggacaccttgtagcaaatcaattaacattttatttgatgtagaaccttacgacaaatagtgagaatttccacaacacaaaaattgtgaagtttttggcaatgcataagaaatgaacattggcagatatgtttcacgtggccaagaacttgatgtttcatcagccatgaggctggtagtgtctctattttacacacgtgaaacatgggctaagtgaggtaaagcaagttgcctgagatcacgtggcttgtgatgagaagattcaggattcgactccagctctgtgctactccagagcttccgttctttctcacatatctagttcaggctccttcatctccgagtgggtatggagaccaagtatgcctgttattgttcctcagagaaggatttctggaggacatgagtagtctgaagagttcagcaagtcctccaagttccacccaaatctgataaatgtgctgaagtacggggcgctgttactatacaacatggtgagtaaagggaaccttctctctgatccccagacaccccagatggaaaaaggtgctttgctgcagagcccacggttatctgtctggaagcaaaagtaagggaggccacaaggtctacttccattttcaaactgagggcgcctaacaattgcaatcctgtaaagaaataaattcatttctggaaagttggaaattgtcttcatcgtgccctgcccaaagcctctggtcaagaaattgaggacttgcagaataggactcctcctcaaactcaagcttttgtgttccatgttcaatgagagattctggccacagaaatgttccctacctgctccagcaggaactaagccttcctggaacatgattatcacaaggatccctcccagtgaccacattttctgacatcagcctaaaccaaaacgactcgcctgctcagtgattatataaatccattcagtctctgcaaatgcccaggcttttgttaccactactgctgttttggctgtacaaggcttaaaatgcaaagtaagtcacgatactaacctttgcctccagtaaggaatgctcttcttggagcagcccccatacctgggacaatgcaagtcagcctttcaatgagatgcttagcacacaagccttctgtgatccagctcctgcctctccatcatgcctcagtgtccaacactctctcttcttcagtcaattcaaactatttgtaggtccctaagcacagtttcccctctttctgccctgcagacctgctttatctagcaaatgcccactcattattcaaatttagtgcaattatccagtcatctgggaaactccccttgatccacaaccttgatttagtggtctcccctttgtgctccctgaatagcatgtccatgcttctccgatagtgctcaccacattttatagtaacagctgatgtatctacttgtgtgccccaaccaaaaatcaggttctacatatcttgaggaagttttctcattcaattttgtatgagaatttacggaacttccaattctataacatagttgttaaataaatgcttaacgaaaaggtacacttggttcactcaccaaacaaatatttacaaaggaactacaaggtatatttagaaagcacatgagttcctgagcactgatcctaagttgaagaaaccctcctcacctcaatctcttgggcacatgagaggtctcctcacagactctcaaacaattggtgcttgaagagaggtgggaagtggtacgagggaagatggagggagagcatgactgcctgctgctacctgagtgagaagaggaaagatggagatgagggcaagcagaagcatgtggtccacagcatcacctagtgcctagtgcggaagaggaaagtcttggttccatcactcattctagcttagagtgaatcttctgttgcaaactttcttattgctctaagacagagatcatcagaattgaggcaaaggctaaagcagtactacactttctatgtcagtatttttatatactggttagtggtatacatgcatgcaaatctccctttaaattcaaatgtcatgttagaaagtagggtttatatgtacaggtgtttgtaaatgagaagtttgtaatttagggagtacatatttaatagtgcctcacccagaactgctataggcaagatgatcaggaggaaaaacagcagcagctgatgccaaaatgtgtgattcagatgatttggaaattaagagacattccaaagaacgtgtgcatatttccttcagacatagtctactagctaacagattgaatttttaaaatatatgaataacttttctgacaaaagcttaccaaaatacagcaatgacttagaaatttagcatggttatatgtgatccgtttatctctcccatcatcccactatctcagagtacaaaataaaaatcattcgtttcatttttctttatgctaagtagaaaggaaattgtgtcctgttctcatttcaagttaggttgcttcttgattaaataagagaatgaactcgcctagaataataaatgatcctctcaactgcacgttaactgaacactctagcataaattaacaaagcagagagatcaggtggaagtatagctaaaagactaaaattagtttggcatgggtttggatattagttttgtcactctgtagctatgtaagtttggacaaattaccataaactctccaaatctcaattttctcaactgtcaacagagttgacagcaaatatctcatgaaatggcgagacagatttcaaacttgtcatttacaaacacctgtaaatacgaactctactttttaatatggcattacaacttacaagatttgtatgtatgtatgcaattaaccatgatacaatggcagcataaaatggcaccggtaaagtgtcaggcacacagcctattgcagagtgaacactcacattttgtttccacgtgccccacctcttttcttgatttaaaggatttctactgggcaaatgataagagaaacaagacacttttctgtccttaaggaacttagactggtaaagaggataaaataaacacagacaaagccaggcaggatatacattttgagagcagaatgaatccaggtgatataagaacacaaaggaggaagaccatgtgccaagttccctgaggacatcaggatcaacttcatgaagagaccattttaaatgggtctcagagaattggtagggaccttgtcaatgtgtggtttttatttcctaagtaagactcacagttacaatacacatgtaaacacaggagaagacagaagttaaggcagatgatactctggtttaaaaatccttagaggaattttcactggtcaccaacttttagagctacattgaggatgacaactagggtggaaaacagtatattgtccagatatactattaatataaaatggggcaatgttgcctactgaagggaaggtaggggcaagccttatctttccctttctggctcagagaattcccagctttttttttttttttttgcttttttgagatggagttttgctcttgttgcccaggctggagtgcagtggcatgatctcggctcactgaaacctctgtgtcccaggttcaagtgattctcctgcctcagcctcccgagtagctgagactacaggtgcctgccaccacgcccggctttttgtattttttgtagagacagggttttgccatgttgggcaggctggtctcgaactcctgacctcaggtgatccacccgcctcagcctcaaagtgctgggattacaggcgtgagccaccatgcccagccagaattcccaacattttaaccaaagcactaggagctttccatctgtagtacaatcaccgaacaagccagaaactgtgtcatggcctctttaatccatactattccttctacagagactaattcccttaaaaactaagagacagatgcagccttagcctcggcctacacagggtccagatcatccatatcactgtttccacctccatgtcttgtcctactggaaggtcttcagaggcggtaatatgcatggagctgtcgtctcctgtgacaacaataccttcttctggaatacctcctgaaggaccttcctgacgctgttttataactaacttattacatacttctacttacataagtaaaaatacactctaaataatgataaaaactatagtatagtaaatacataaaccagtaacatagtcattatcattattaagtattatgtactgtatgtaattgtatgtgctacacttttattcaactagcagcttagtgcaaaataaaaagagaggactcaaaggggatcatttaggaaataaactactcccgggaaagggacacaatctcaacaagcaatagggcggcttgtgtagtgtagtgggctttggagaagatccctggtagcagtggagattgggagttgtggttttcacgtacttagtcatttagtcaaccagagagacaaatagttgggataaaagaggatctcataaatccaacagaagagtacagaacacagagcttaggctgttcacagcaccacctcctaggaaaacactgtgagcactcaggttaacagtaggtagatctgtgcacaagccatttactctactatggccaagcagcctaatctgtcgtgaacattcctcttccccccaaaaataaagaggaaataaagagaagggagaaagggagggaagaaggaaaccatgagtcttaaaaagatagcacagaaacaattattctgaaaatgtagaggaaaagtatagctctttaaaattatttacgacacaaatcagaagagttcaaataaattacaatgcattcatatattttgcagatgttcactcatgttctcaaataccattaaacgcatcagaaaatttgtagaatgtaatatgaagtgaaaagagctgggtgcaaaagctgtatatatcaactttacaaaactttgcacatgcggtacatataaagtcatcaattgcttaacaacatttcagtcaacggtggactgcagatatgacaatggtttcatgagattataatggagctgaaaatttcctatcgcctagcaacactgtagcagtcataaagttgtagcacaatgcattactcattgttgtaaacaaacacactaagctgctagttgaaaaagtgtagcacatacaattacatacagtacataatacttactaatgataatgactatgttactggtttatgtatttactatactatactttttatcattatttagagtgtatttttacttacgtaagtagaagtatataataagttaattataaaacagcttcgggaagttccttcaggaggtattccagaaggcattgttgtcataggagatgacagctccatgcctattactgcctctgaagacctttgtggaggtggaaacagtgatatggatgatcctgaccctgtgtacgctgaggctaaggctgcatttgtgtcttagtttttaataaaaaaagtttttaaagtaaaaaaaattaaagcacaaaaaggcttatagaataagaatataaaaaagaaaatatttttgtaaagaagagtcaaaaagttaagaaatttaaaaatgctcatcatcactggtcattagagaaatgcacatcaaaaccacaatgagacaccgtctcacaccagttagaatggccatcattaaaaagtctggtaacaacagatgctggcaaggctgtggagaaataggaacacgtttacagtgttggtgggagtgtaaattagttcaaccattgtggaagacagtgtggcgattcctcaaggatctagaaccagaaataccatttgacccagcaatcccattgctggatatatacctaaaggatataaatcattctactataaagacacatgcacttgtatgtttattgcagcactatttaccatagcaaacacttggaagcaacccaaatccccatcggtgatagactggataaagaaaatgtggcacatacacaccatggaatactatgcagacataaaaaagaatgagttcatgtcctttgctgggacacggatgaagctggaagccatcattctcagcaaactaccacaggaacagaaaaccaaacaccacatgttctcactcataagtaggagttgaacaatgagaacacatggacacagggaggggaacatcacacactgggacctgtcgggggtggggggcaagaacaaatacctaatgcatgggggcttaaaacctagacgatgggttgacaggtgcagcaaaccaccatggcacatgtatacttatgtaacaaacctgcacattctgcacatgtatcccagaacttaaagtaaaataaaacatacaataaaataattttaaaaaatgtaaaagtcaaaagctacagtaagctaaggttaatttattattgaagaaaaggaaattttaaaaataaatttagtatcgcctaagtgcagggtttataaagtctaccctagggtacagtaatgtcctagaccttcacattcactcactactcactcactgactcacccagagcaactcccaggcctgcaagctccattcatggcaagtgccctatatgggtgtaccatttttttcctcttctataccatatttttactgtaccttttctatgtttggatacacaaatacttaccatggtgttacaactgcctatagtattcaagagagcaatacgcttccaggtttgtagcctaggagcaggctataccataaagtccaggtgtgtaggaggctacaccatctaggtttgtgtaagtacacgctatggtgttagtcaactaaagaaacaaatagtggtgagagaagagaaatcacctataggtgcacttctcagaacatactctggttttcagcaatgtatgactataaatcagcaaaaataaacggaggtgaaataatagttcctctaactgagtgatgtgattatgtaagaattttagttccttcctactatttttctattttcttccaacctttctgtgaagttactttcataatttaaaacttgtaatgttttattaaaaatagatatgtttgcggccgggtgcggtggctcacgcctgtaatcccagcactttgggaggccaaggcgggcggatcacaaggtcaggagttcaagaccagcctgacgaacatgatgaaaccccgtctctactaaaaaaaaaaatacaaaaattagccaggcatggtggtgcatgcctgaaatcccagctacttgggaggatgaggcaggagaatcatttgaacctgagaggtggaggttgcagtgagccgagatcgggcctctgcactccagcctgggtgacagagcaagactctgtctcaaaaaaagaagaaaaaaaaaagatatgtttacaaatatacagacattaataatggagtctgaggataagagccttcaaagcaaaggtgaaatgtcccaaaagacaagtcggtaagaaaacacaggccacgtcctaaaggcgttggagaactgggatgtgtgagagcaaagaaagggccttgaatgccatgtttaggggcagagattttcttctgtctgtagcacatattttgaattagaaagggctgttgttggagctgtctttctagagattccggagtcggcaaatggcatctaaaattaaatggattagaggtgagtggctattgtgatagtccaagtgtcaagcagtgtcagcctgactatgtggtctcagtgacaaaagagaggacatggtagatgtgagtgttgagtacaagactcagccaatggttgggtataaaccgcctgggagaagacaggactgaagaaggctttgaaggctagattctgggtgatgaatcagagatcaatattagtcacaaaagttggaggaagaatatgtgcagcttatttcgaacatgttgagcttaaagtgtccatggagtatcttgagaagattctgagaagttgcaacttaagagagaagcctgggctggtggtgtggatttgggaattatctgtatagacaggagaggtggtcagataataaaggaggagaccaggaaaggaagagcaggagagggaggaggaggaagaaggggaagaagggatgcacataagacagaaagagaagataggagaagataccagaggaccacactacagaaaagaagtagccgctgacacagccagaagcagcaaacagaaagaggagtgcatatttcaacactgcagagtaggaaacaaacaccaacaagagagtcacccttgatgtgaaatgttatgcaaagttcaaagaggctgcacactgacaagtcgctactggaaatagtgattaggcgctcaagtgacataaaaaaattttaagtaaaaaataagaaataaaatcaacatgtccaatgtcattgcaatagacactttcctgtgggaactaccattttaaaaacacatctggagtccaatatcctaagtgtcaagtcattcctcctttgtccacatggacggaagacgttcatctcttgagtgctaatggtttgaggccaccaccacagcaaccaacagagcaactgttgtactttaactctgcccagcactaactacattctagtctgtggcctgcatggaaatgaagttgttctttcagacactgctgtgtgggactcagtctggctgcaggtgcctgcaagcactgtctgatttgagatattttctataattactggaatgatgaaatctgtcatgcagtaaggtagcaggcaggagacacaaattcattcctagcttcctgaattaaaaataaatggttatcaagtccaattgaatttgttttaattagctgggttttttttttttaagtcacaattttcgcagctcctttatcaaactgactcttccttaatactaaagaggaaacttttcacacctaaaatattcctgtaaagacaaacttgctgggtcttgttcatgtccctgttggcccctaagtatattttacttatttgtctcatccattgcctcatgtctttccaatgtgaactccataaagaaagtgatttttgtgcatgtaatgaactgctgtatccccagaacttaaatcagggtctggcccatagaatgagctcaatggatgctggtggaatgaatttatggaagaatggatggaaagaaaacatacattataagaataaatcctcagaaggatagcagcaccattacagaatcaggtgaaggtgagtagactgaatatgaagaagatatgatgagtgtcccacctatgtggggagaagatgtgaattgctgtaatgagatataggaatataattaattggctttctttatatccagattggatgcagctttgattcttcagcattactgtaaggggatggggcggggaaaatccataataagctctgtgatcctacaaatttcatttcagaaagttagaaatttattaagcaaataagacaggccatgtcaccagcggatcggcatcaggcaaaaacccaacagtgtaattggccaatgctcggaagaatgacataacgaagcttggggttgccatgagatctacatgaaaacaatttctgtgctgaaccataggtagctcttgagtttataaaccctcaagtctcccattaatccagtcttcaataactggatgatttaagtagttacagtattttttaaaatcttaatcctgagagctaagtattcaatcgttttctaaagaaacgcagcaaagaaagtaaaatcaaacaacctgcctcaaaatggcagcatgtccacacactggcttcggtctgaaggcaccaaatgacctgggcatcctctagtatgttgcaaagtttaatcaccactagatcgaaactaaataccagaacacaggtgtgcatcattcaaattggcaaatcaatatattaatactttttttaaaagtcagtgagaaaaccaccaaaatcatttattaaagggaactcaagtggcacaggaagatcttcaagccaagtcccattcatttcccattaaatctgctacaagaaccttaaactgctcccctcaaagaaaaagttagttggacagtgaccagtgagatacaaaagaagaatcacaacgcccaactactaaaacccaggatggttttttaaaaaatgaatcccttgattgagggtcaccagagaagacagatattaactaatcacagaaagaattaattagaagctaggaggagaccagtattccaagccaaagtagtaatctgtgtgaagactttgctggaacttgtattatgtctgaaagattgaaataaagtgccttaatccaaactgggattttcctgactgacatctactagttcttcaggtccccagcctacacataaccacttcaggaagcccttctctactttatcttttcaactaaatcacgccttctgacactacattccctgacgacaccttctaccattgcttcattgaactaaaagaattatctgtaccctcgggtatgattatagagatgcttagtctaaatgcaaaccaagatacaactttagagaaaattctggagcctacagagtagaccagagaagcatctcacaatgaatcctccccaaataagtcttattctttctatatatgtcaagcattaagtaaacacttgagcagcacaagtcacaggcgatccatgctggccattaatcggcagtggcaatatcagtaaagtcaacgctcttccagcatctcctggactaagatcagtgtccagtgtttttattttatttttttccacagtattttgactatctcaagataagcttctagagaaaaaaaatacaaaaacaaatgtaacaaggtcaattgagctgcgcgtgctatgtctggaaacacatgtgccgtcacataatttagcacctaaagaacaagaggctgcaaaactgcatccccagggaagcccagagctggcaaagtaatctctgcagacatgaggaactctgctcacccactttaattttaacgctactatgtacaagcttaaatatagaatcaatcacaaagaaataatacatatttaagcagacacagggctaacgaatctgagccagtacaattctgaaaactttcaagtttccctttctcactctgacatttctaggcttgctaatagtcctcacaatgtccaggaagatccgtgtttccattattccctcctgttatcatacactgaccatatcttgtgtgcctcctagatgattcatacattttcttagctctaaaaatactacagttttagtgctagaataaatgtagagaacttagaagtaaaaaaatgttttgaaggtgagataggaaaaagccaactatcttgaacaattcaaaagactttcttagcaaatctcatttctgagagctttgtatagaaatttcatcatcagctttggctgctatggcaactagatatttcagaaatgatttgaaatgagtatcactacatatccagcatcttttgcaagaaacagaaaagactatgaaatctaatccactgtaaatttcaaaatatagtgttaattttcatttttgaaatctatttatgcttctatttgcaaatcaatagataacaacctggtacgattacatatgagcacgatggagaagtctttcattttagtccttaactgtcacattaaagcatcatttaggtactctcgtcccagttttattaggcctttaaaaaaaaaaaaaggctgggcacagttgctcatgtctgtaatcctttgggaggtcatggtgggaagactgcttgagtccaggagcctaggtaacacacagatacctcgtttctccaaaaaaaaaaaaaaaaaaaaaaagtaaaaattagccaggagtgatggtacacacttgtaataccagccactcgggaggctggggtgggaagatcgcctgaacccaggttttcaaagttgcagtgagccgtgatcacgccactgcactccaacctgggtgatagagcaagaccatgtctcaaaaaaaaaaagacaattttttgggcagttttaggttcacagcaaaattaagtggaaagtacagtttccatataatccttgtcccctccccaacctaccccactatcaacaccctgcatctaagtggtacatttattacaatcaacaaacctacatcgctacatcataatcacccgaagttcatagtttacgctagggttcactcttggtgttatatattctatgggtttggacaaatttataatgacatatatccaccattagggtatcaaatatcaaaaatcaaatcctgtgttccatctatttatccctcccactcttcttaagccttagcaaccactaatcttttcaccatctccatagttttgccttttccagaatgtcaaatagttggaatcacatagtatgtagacttttcagatagacttctttcacttagcatgcatttaaggttcttccacgtctttccatagcttgacagctcatttcattttagcattgaataatattccattgtctggaggtaccacagtttatctattcacccactaaaagacattttggttacttccaagttttagcaattatgaacaaagctgctataaacacttgtgcacaggtttttgtgtggacatgtttccagctcatgtgggttataccaaggattgtaatgtcttgactgtacagtaagagtatgtttacttttgtaagaaactgccaagttttcttccaaagtggctgtaccattttgcatttccaccaacaatgaatgagagttactgttactctacattcttgccaacattcagcgttgtcagtgttttggagtttggccattctaataggtgttaatggtatttcattgttagtttaatttgtaattccctagtgagatatatgtcaagcaccttttcatattcttatttgccaggcctttccttttagccatatctatgccaaagcccaagtcccactgaatcttgcacaacagaataaaaacaaggtcttcaatgatgagttagttgtgatttgatttaatcaatgaaccagccatggttttcacattctaccctgcagagctactattcctgggtcactgaaatagctcatagcaaatacatgctagagcaaagaaagctgtgtggaaatgtaaagtaatgcaatgactggataatttaatcagcatttacacccatgcaccttaactacatatatgtaaaagcatcaaacgagttctcaaattccctgcttaggtcatgacactgaggggttcaaatagaatcatcagtgtttgcttgaaagtccacaaagtaaggagatttattcttgattgaagttttcacagcatgttaccctgaatatttagggatgatggttaagggttatggaggtcaagatgaactggtagagagagcagcatgttaagttgtgtaagtgtttgctgaaggacaatggggaaatggagtgagagacattctgcaagtgtgccacaattcaaaagaaccagcatcctcattaaaaattgtgaatttattaaaataatggcaaagttattttggaagtaaactgatctaactataattctttttcctcttgaaacttatcaattttaagatacttacaatagtgtaatctcttaaaagttttctacctctgcacttaagtgtagaaacaagcttatgctgaccttttgaatagaatctaaagcaatgtgcattacctttatcaattctaaaaggcatttccaacagctcagtcttccaaaaatatactttaaatgtagtagttagtgcaaatgatatatcagaagtatcgagtaaagaagaaaaatactatgacattcatagatgtcaaatatgttagaaaatcatcagcactgtggatcaggagttctgggccagagctgtgggcagaatgggacattaaatggggcccttattaggaagttgacatctgagcaaagacttgaagaaagtgaggaagtaatattcatggtttatctgggggaaagtattctgagcagagacagcagccagcgtagaggccctgaggtgagagcaggcctagcacattgcaggaacagcaggagggtgagtggaacaaagtgaagggggaggatcagctgcaggcatcttaaaactttggcttcggccggccgggcgcggtggcttacgcctgtaatcccagcactttgggaggccgaggtgggtggatcatgaggtcaggagatcgagaccatcctgggtaacacagtgaaaccccgtttctactaaaaatacaaaaaattagccaggcatggttgcaggcgcctgtagtcccagctacttgggaggctgaggcaggagaatggcctgaacccgggaggcggagcttgcagtgagccaagatcacgccactgcactccagcctgggcaacagagcgagactctgtctcaaaacaaacaaacaaacaaacaaaaaactttggcttctactcagatagggagcaccttgggaattttcagtaaaacaaattactttgaaaaatttttcttatcatacaaaattttaaacatgagcaaagtagagaaaaatgatagtatactctagtgtacgtatgattcagtctcaaaattactgattcatggtcattactgtttcatttacactctctaccctaccctcaccccaaatcattttgaagaaatcttctgacgtcatgtcttttcaaccataagtatttcagtagggatctctaaaagacaggcattcttttctttctttctttctttcttttttaacaccactgtaatactattatcacgtccggtagcggttaaatcagctcatacctgctcagccaaagagaaactgtgtatgccactcttcccactcacggacccatgacttcatgaacgtggcttgaaattaaccatgaagggagtgtatacaccatgaaaatccacaaatactaacagcagggcttttatttctagtaataaaattgttaattctttactatctgatatggtttggatttgcgtccctgcccaaagttcatgtcaaattgtaatccccagtgttgtaaaaggagcctggtgggaggtgattggtccatgggggtggatttcccccttgctgttcttgtgataatgagtgagtccccatgaaatctggtagtttaaaaatgtgcagcacctcccactgctctctcttcctccttctccagccatgtaagatgtgcctgctcctccttccccttcggccatgattgtaagtttcctgaggcctccctagccatacttcctgtatagtctgcagaactgtgagtcaattaaacctctttttctaggtgaattacccagtctcaagtagttctttacagcactgcaagaatggactaatgcaccatcacacctctgactcacacgtagaagattaacaatgcttacttaataccattagatgtctactctacacaatggtcatatttctttggtaaacctttttttcagtttgtatgtctgaatagtgatcaaaataaaatctatactctgtgactgtttgatatcccttaaatctctttgaatccataggatccccaacatctctcttttttctggcatttgtttttattgttgttaagggaactgggttgtttgccctgtggagttcttcacagtctgcaattgctaattgtatgcctatggtttcatttaacatgttcctctgtttcctataaattggtcattagatttagtggcttgctaagatgcaggatttattttggggggcaagacttcttcataggtgcaggtggtgcacgtccatcagaaggaactgtcatgctggttgtgtttcatttttgtagtaataatagcctactgatgattctttcaaaatgataatattttgcattctatcacttattcttcatttactattttaaatacatctataagagaaatttatattaatcaatcatttggctaatttacactttattttattaattttttgagagatgagattttgctacgttgcccagcccgggctcaaacttctgagcttaagtcattctctattctccctggctcagactcccgagtaactaggactacaagcctgtgcctaatttatattttaacaggatcactctgattgctgtggtagaaaagactctagaggcaagttcgcaagtgtgaaaatagagaaataatctaggagggtgttatggctacctgggagagccatggtcacggctaaaaccagagtataactctggaagtagagagaagcaagtagggaagtccaaggactgagttgacgcacagccaacagcagttgtgagtgtactggagttatagatttttccacttgcaagtggctcagtaggttcctgatggttaataggttttatcatagctgagatgggaatttgggctctgggtgctacagctgggtataaaagcaaatcactcagcaggagggtgaggtaggggccgggagcgggtgttgtgaagagaactgatcatacaggtttcttgtcttaacaaagctctgagttatatacttaatgctaaataggcagttagtttaaaattccagttatgtacttttgaaagacagcagtggacattaatgatagttactgcgctggcttaaaaataaagaaaaagtaaagaagtctaagaaaaaatatatttgcacatatgtgatgtttgaggaagtcatgagattatcatgttaaagacctacttaacacattttcatcagcactctattattgcctatatttaggttgttcatgattaaatcacaattactaattgtagtaattataatctgttgtaaccctctcttgagctgtcaaaaaaagctgttgtattatttaacaacctaatttgacaagaaacttcagctactatattatttcaaggttttaaaattttcagaccatctgtttttaaatggtacatgcttcatttctttgaagacatctcatattttctcaggtagattcttttacgagtttttaactgctttcactggctaatttccgttcccaagtttttatgaaataatttacaaatgtattttcttttccagtgcttctaacgccactgattagttttctctaacttttgaatagaaaacaagtcgatggagaaacacattcagaaaaacacaaattctgaactccacatcatattgaatctccagtttctagatggagtttaatgtcgtcggtcacccatgccctcgtgggttcaggcatcagcgacgccactgttgctaataagcatgtcagcttcttagggaagggatgcagagaatcggaggacacgtttcccctgagacacttataaaaagaagagcataatcttacagctgggtgggccatgaaggttttccaacaaactactcttcccatcttttttttttttttttctgcaaaggttttcttatgcaagggggaaggggctcagtccctggcagctgctttcctcagggcggggccgggacattgcacaggctctctcactttctcttgggggggaagtgtgccccccacccttttcctgatgaacttgagggcctgtttgtcctgggagagcttgagcaactccacagcacaccgctctatgggacaaagccacacacctctcggggcatgtcttgcgcgattttggtgtttgctgaggcgcccgcttggctgtgccttggtttcctcacgttcttggtcaccttgtggcctttgttgaggcccacggccatggggtagtgcaggaccatggctgttgctctccgagggccgccgcagaggacccaccttctcttttgtagaaggaaaaaggtgtagaaaggggaagtgactttctctaaagtagagagtagccagtagacatgaatttggaaaggtttatgggggctgaagcatggaattcacatcagaataacgagaagagaggttaatggttaatatattttccaagaaaccatgagtagctatattctttctctcatctctttttcacacacacacacacacacactcacacacgtccacacacattcacacaccctcccatgcacaaatacacacacaggtccacacaacacaagcacacactactacacaccctcacacacataagcacacatgtccacacacatacacacacacccttacacacataccctcacatgtacatatatacccatgtccacacccttacacacatcctcacatgtacatatacacacatgtccacacacacgcacacacccttacacccttacacacaccctcacatgcacacacgtccatacaccctttacacacacccccacacaggcacatatgcacacgtccactcacacacacacgcacacattgttacacaaacaccctcacatggccatgtacacacgtccacacacatgcacacacccttacacacatacacatatgtccacacacgtacaaacccttacacacacaccttcacaggcatatatacgcacatgtccacacacatgcacgtaccctttcacacacaaatacatgtccacccaacacatgcacacactcttacacacacatacacccttatacacataccctcacacacttatgcacacgtccccacactcgcacacatacgcacacacctttacacacacatcctcacacatgaacacaccctcctgtgtgcacacacatacacacatctatccactcacatacacacaacaccctagatgcctagtttggaacagaagcggttaactggcaaaacatgttatgtgaatggcgtcccagtattttctttcaaatcacactaacaaccaggtaatgagatagtttgcaagggagaaagagtgtaaaaatgaaagaaaagtacttgcaggcaaatcagtatttgttcacctgttgaatgtgttttgtttgaatagatttttattgaaagattctattgtatttcccatggtttagatatttttccagcttttgtataaatatgaccatacaaaatgctcttgttcccgcccaatctctatttgcaatttactgaatgagtcatttacagagaggatcctgagaccatctaaaatactatgagtgggccctgaaaatgctctctttctactccctcctaatgaatttaagtgtttgaagaaaaacttactaaattcatgcgcctattaatagttccacaatgaagaagaatctaacaggagttcaatgtaaccactgtcatggcagagaaataacaaatgcatattatattttttaaaatcaggcttttttgagtgcatcaattatcctggtacttcccacttagtaaaagcagtgagtaggccctttaaatctatttattaattcactgagcgatctcaacaaactgttaaaaaagctttaggtattcattcaaaccaactaaaatacacaggtatcctttagaaaattaaaatctaggtaaagagaagataaaaagaggatactgattattgatcacccattctacgacgggccttttaataggccctatttataaatcaggtcaacacacgaacgtctccaccattaaatagaaatttgacaggagtaagagcattgtttctctgatgtatcgcccagcacctgcagtatctgacacacaacagatgctaagtcaatacttttgaatgaatgactgaatgaatgaatgaatgaatgagatgtcttcccagagaagtggttagtcccaagctccataacattgggtgggtgtcctcagccaaagtcacatcgcctcagggtacagaaatagaagacaataaggaaatgtgtttaatgaggatttcggtcatgtgttgatactcagctcttcacctcactccatcgactgacttcattcttatgattttatacttaaaatgtttgtgcatttggatgcaaacagccttaccaaggggaaattaggtataactctggagacaatgatctttattcttttttaagggcccgtttcaggcaatgatgccaggctttgctgttgctagggagatagagagaatgtggggggaatgagggggacattgagtgttttctttagcctgcaggccagggcacagtgaccagaatggagaaatagggccagcctgttctctcaatcaaatcccgtacagtccattgagaatagaagtagtcatgattacgttttggtatttagcctagaaccaccaaaaatatcagcctaaaacaattctattccaaatactgccatgttatttaagttgtcaattgttaggaagcatgggggcaattttgtgttttgacacggatatggattaagcacctgggagaagcatctgctctgcaaggtgacagcaacaagcctgacagagaaccagagcaaacagtcttttatcagctggtctattacctgagagacccagagaagactgtgcccagctgtgtgaatacttcagcaggcttgggctagacagctgctgagtgttcttcgcagtttctgtcatggcctggatacaagtgctcttaatctagtagattttaccatgagtctggctgctttttccagcacgctctccaggcctgttcattgattcatgctgcaagtacttacagtgagtctactgtgcggggggccctcttagcttaatatacacagaaaagacacttggttcagcaaagaaaagaaaggaggattcattaatagaaagccagctaatgcacagtttttccccccaaaatgtttgaattttttaaaaaattgcaggaactcacttcttagcacatcaggtctcccttgtctttttgccctctgtcatcttctctaaaccgaggacagcgatcagctacgtgagagtggtattcatgagtgaacacatggccaaaagaggaacacacaaactggtcatggtattttctttgcatctctcacaataacctctcctttaattttcaaggaatgcaagtcatctttagaaaatgacaagaataagtccaggcgcggtggctcacacctgtaatcccagcactttgggaggccgaggtgggtggatcacctgaggtcaggagttcgagaccaatctggtcaatgtggtgaaaccctgtctctactaaaaatacaaaattagccgggcgtggtggcaggcgcttgtaatcccagctacccgggaggctgaggcatgagaattgcttgaacccgggaggcagaggtagcagtgagcagagatcacaccattgcactccagcctgggcaacaagagcgaaactccaactcaaaaaaaaaaaaaaaaaaggaaaaagaaaaagaaaatgacaagaataaacaacataaggtgtctatgagaaacagaaatcacccaattgccctggccatattgtaggctgctgtaaagaaagttcactaccaaaagaaattcttcaagtgccgtggcatctggtgttaagattccaggcatctgacatttgccactcgacaggaaagatatagacaataaagtcatcctttaaggtgttactagaatgctctgtgtaaacttggtagaatgtaaaggtctgaggaacattgtgttataatgttatactttgcagtaccttttcctgtaaaggagtcctggtttactgaaaatttaggaaaggaatgcagattgtgacatttgcttctctggcataggaggcaaggcaaaatgcaaatgttagaattaatctcactttacagcattgcacttaacacacgcgttgaagtagcacagattcaagaatcaccatgattgccttcgttcaacagcttatgacacagtgcccagattccttttaatttcatgtaaaagaatcaatgtgtcaaactggcagagtatcctgaataaccctagtgagtggcattggaacactatggtcggtgctattcacaagacagcattccagagcaggataagaaatgtgtcagctcaaaaacgacattaatcctgtttcgtaagcaatattccattacaataaggtatactgcccaggaagacaacatgtttgctacttctagatgtctaaaaggtcattttctccagtcaaactttcattacaagaagacaataaaccaatatttgtggtcatctttctctttatgaaaaaaagtcaagaacttgagaaattgactgaagtagcaccctgtcttctaatgtagtcaagtctaccatgttctgttacgtacatttatctcaggaaacagtgtatatgaagacctagagacgaaggtgtgagagtgtgtgtgtgtgtatgagtgtgcgtgtgagtgtgtttgtgtgtctgtgtgtgtgagagtgtatgtgtgtctgtgtgtgtgagtgtgtgtgtgtgagagtgtgtgtgtctgtgtgtctgtgtgtgagtgagcgtgtgtggtgagacagaggaagaaaatatatgcaacacaagaagacaggactatgtctttttttttttttttaaacaatgtactgcccacgacagtcacggaagtgatgaaaatccagaacaatatgatgggtatcataaaattaccagggagtcaatgactgcccatgtaaaggagcttatagcagtgactgatgagtgaatcattctcagccttaaatgcttctcttacccaattcagaactgtcctacttcctgttaaatgtgttgttaaccagcaatttttaaattcttaatttaagatccttgccttgctttttaaaattcactattcaatcaaaggggttcacttggctatcaggaatatttttccccaaagaaggctacacaatgcacatttgcaagacagtggtcaaagaaattagccaggatcctttcatctcgatccctggagttggtggaatgcaatggaagacagaggactggatctgactatggttctgacacggactaatttttgaccaacaaggttttcatcttttgtcatcttttgattcctcgcttataaaatatcttcctcaaagcagttataaaaatttaaaatgagataaaactgaaactataggttgaaaagcataagacaattaaaagtattgctactgttagatattttgttagcaccttttgaaaacacaatttgtttttctataacaacttaggcattcctgaaaatcacacaccacagaaaattgagcaataaaaaccacagagcttaagagaaaagaaacagggtgcaacgctctaaaaattttatctgtgccacataaaaaacaaagataggaacctaataaaaacggcagcacagtgtttcactagttaattggctaagaaatacatacatactacaatagttttgtattttcaagacaatacattgtttctatcctgacaaagacctgaaagttggctcatggaagtgagcaccggaagagctaaagcttgtgagttattggaaagtggtagaaagaggattgtctgaagctggagagctgtcatgccagtaggaggtgttatgctcatatccaaggcctgaactgtgaggtagctggtagatgtttgagaaatgggcgttttatatatttctatagggctcaattcagctgggtgcagtttttttcattcactcacaaatgaaactatgcataaacaatcacgaaattcacattgcatgagaattgctccctaagatatcaattgtgttggaacaaatttgtgttttcaaatgagcattatagcagaactgactgtatcatgatatgtgtccccaaattggaaaacaaaaccccaaaataattacatgaaaatcaactggttctctttgttcctgctacttaaaaggagtatatacacggaagaaacacctcagcgcagctctgagcttctctccttttatcagcaaatagatgaacatttgatggtttgaaaaatcaatgacttcagacatgaatttcatcacacctctgtcttcctcagcatattatttgaacctcacaaaggacatttgattaggaaattaagatcaataaccagtagattaccaaatacagggagattttactttcattctccaatcattcatcagattttcatttccaatcttgattcactcagtaaatatttattgcacatttgtaatgtgtcaggccccattctaggcactggagatgcactggtgaacaaaacacaaaaaggtcactgtcttcacgcaacttacattctagtgagagaaacagactacaaacaatggcacattgatacatatacaggccttgtgcttgctttaatgcactttgtagatattgcattttttataaactgaaagtttgtgacaactccgcactgagcaaggccatcagtgccattttcccaacaacaggtgctcactctgtgtctctgtgtcaaattttggtaattcttcccacagtgtttcaaacttgtttgcattattatgatatctgtgatggtgatctgtgatcagtgatctttgatgttactattgtaattgttttagggtaccaaaacccacacccctttaaaatggtgaacttcatccatgaatgttgtatgtgttctgactgctccaccaaccagccgttgccctgtgtctctcccactcctcgggcccctctattccctgagacacaacaacattaaatttaggccaattaataatgctaccatggcctctaagtgttaagtaaaaggaagagtcacacatttctcacttggaatcaaaagccagaagcatgaagcttcatgagagaggcatgtagaaagctaagataagccaaacagtcagccaagttgcaaacgcaaaggaaaagttattgaagaaaattaaaagtgctactccagtgaacacacgaatgataagagagtgaaacggccttattgctgatatggagaaagtttttgtggtctggatagatgatcaaacccgccacaacattctcataagccaaaccctaatccagaacaaggccctaactctcttcaatcctatgaaggctgagaggtgaggaagtcacaggagaaaatttgatagctagcagaggttggttcatgaggtttaaggaaagaagccatctccgtaacataaaagtacaaagtgaagcagcaaatgctgatgaagaagctgcagtaagttttccaaaagatctagccaagagaattgatgaaggtagttacactaaataatagattttccttgtagatgaaacagccttctgttggaaaaagatgccatttaggactttcatagctagagaggagatgtcattgcctggcttcaaagcttcaaaggacaggctgactctcttggtagaggctaatgccgctggtgactttaagtttatgccaatgctcattgaccattccaaaaatcctaggactcttaagaattatgctaaatccactctgcctgtgctctatcaatggagcaacaaggcccaggcaatgctcacagtcacccaagagctctgatgaagatctatgaaaagattaacgttgttttcatgctaacacaacatctattctgcagcccatggatcgaggagtagtttctactttaagtcttacaagttaaaaacaaaatacattttgtaagtctatacctagacagatgtataataacatctatccatgtagatagtgatttctctgatggatctagcaaaaaaaattgaaaaccttctggaaaggattcaccattctagatgtcattaagaactttcataattcataggaagaggtcaaaataacaatattaacagaagtttgcatgaagttgattccaaccctcatgggtgacttaaaggagttcaagccttcagcggtggaagtcactgcagatgtggtagaaatagcaagagaacttggattttaagtggaggctgaagatgtgactaaattgttgtaatctcatgaaaaaacttgaacagatgaggacttgcttcttatgaatgtgcaaaaaaaagtggttttttgagatggaatctactcctagtgaagacgctatgaacatttttgaaatgacaagaaaggatttaaaatattacataagcatagttaataaagcgtagtagggcctgacagaattgacttcaatcttcgaagtccttctgtggataaaatgctctcaaacagcataacatgcaatggagaaatctttcgtgaaagaaagagtcaatcaatgcggctcacttcactgtcgtttatttgaagaaattgccacagccactccaaccttcagcaactaccaccctcatcagtcaacagccatcaacattgaggcaagatcctccccaaggaaaaagatttgctgaaggcacagacaattgtgaacaatttttagcaataaagaatttctaagttaaggtatgtaccttgtttttttagccataatgttctttgacacttattagactacagtgtggtataaacttaacttttatatgcactcagaaaccaaagaatttgtgtggctcgctttattgtcatattcatttatcaaggtgatctggaaccaaacctgcaatatatccaagctatgcctataatacataaattatatataatgttagaaagtaataaatgttatgaacaaaagtagagcgcagtgggaatcagaaatatataaattccctttcttgcaggggatttggtaaaagaagtagagctgtggtcgggcccagacaccatcggaatttgtaggccaaaggaaggggaattcactgataattttgtgtaggctgtagcatgagctaactcaaatgtttaaaagattattttcactgtactgtagggaatagatagaaggtaggaactatgagagccacttgggagccctttgcaatagtctgtgcaaaaactgatagtagtagcagtagaaatggtttaaagtgagtagagtcaagatatattttaaagttagagcccggggaacttattgatgttgaagacagagtaagaaaaaggatggcatcaagaatagcttcaaggtgttttattcaaacaatgaaacagtagaagctttttttttttcttcttcttctttttttttttttttttttttttttttgagatgcagaaaatggcaagaactgacttggggctgagggagagaggagtgccagaaatcaagacagtcttaataacagccaaagatcaacctaagaatgaaaagggaagcttcagcttgaattatttgaagttgaatagtggtcagtttttgttttttgtaattaaagtggacctcctacaccttgcatcttccccagccgtgctctcctgtcaacaactgtctgatatctgataatagctaatccctatagccttgcaatttcagaatagggggaaaatacatttaaaaaatttgatgattaaaaaaagatagtgataaccaagccactttcttgtggtactaaacatttgaatgtagtctctaatgttattactttttactaattttagctaaatacattccataaaaccaacaactcccacttactgattttcctgctccaagttctaacaatttttgtgaagtctctgggatcttctacatataaggtcatgtcatctgtgaaaagagagaattttactccttgttttctgatttggatgcatcgtatttccttttctagcctaactgccctggctaggacttctagtgctatgctgaatagaagtgtcaacagtaggcatcctcgtctttttttctgatcttagagaaaaagctttcagttttttaccattgagtgtgatgtcagctgtgcccttttcatatacagccttcattatgttgaagtaaattctttctacacatatattattaggcatttttatcaataaaggttgttacattttgtaaaatgctttctctgtatcttttgagatgactgtgtgatttttttccttcatttgttgatatactgaatcacattaattgatctgcacgtggtacagaagtagaaaaacaaacttagtttctcctactctactttcataacatgcttctgacactcattgcggggggttcttccccacacatcaagcaagcaatcaattcttgagcagacactagctgtcctccagtacagtcctgccactatctacctagagatagtgtttccatgccctctgcaggcatgccaccctccaggaacctccaagtgttcacctctctctgaacccaggttttgggggtttggggagagtgctgttacacagtcatgattgactaaatcaccggccactgaagaccagctcaacctttagcccttctcctctccctggaggtgggggagcaaggatggggctgaaagtccctaccttctaatcatgccttggtctttccagtgaccagtccccacatcctgaagctacatagggtagccagtaatcagtcaactcattagcataaagagatacttaatactttggagattcccggatttgaggagctgtattcaggagactgatggaagaccaaatgtaagtatttcacaataccaaacatgtggtgaggcattcttgcatcccaacgacaaatcccacttggtcctggtgtatgatccttttaatgacctggtgaagacggtttactagtattgttttgagaatttttgcatccatatttatcatagatattggcctgtagttttctttttttgttatatctttatctagtttttgtattgggttaatgctggcctcataaactgagtttagaagtgtccccttttcttcaatttttcagaagatgaatgtcaaaattccatttgtttatcaatgatgtgagccacttttttgttgctgaatcagatcatttaatagttttcagatacagaataatatatgtgtttactattatgtaaagtaatatgtaatagtgaaaggcattaatgcacttttaagtttatatttgcaatgttaacattttctccatcactttctgaagtcttgacagctaataaaataatcaatcaagcactgatttgtagtgtttgctgatttccctggggtaaatacaaacaaaagtatttgcacgtttggaagctgatttcaagcttccaatgtttgatatggagcccagagatgggaagaaatgagcagtttatttacaagatgtaaacaacctcaaaagcacagataattgtaaatggagtaaaaaactagaaagttacaagttttgagtattgcttccatttaatataatttaatgaactataagtttatataattgaatagttaatatatactgtttaacagccaacatgtgaattcctgagaatttagcaattggctcctgtgaaatactacaagccagctccagcacaccattgtagcttggtctccagaaaacaacttgttagaattatttggagccaaatatggggaaaggaccttacccttactttctgcattcctcttttcttacgtctccctatgtgcacaaaggaagctactgtcaactcttcagctgaatcaaaccccaaatcctgaggcaggcttctcaaggtctcactgagaacccatggcaatcaggactccactcccagccacccgggattccagtaatgaatttggggaggaaagatcatcagtggttatctgcacatcaaaagtatgcaccctttgaaaatatcatggaataaacatctctgttgctgacatcattagatgtatctttttggattatcaaggtttcagacttcagcttcttggccactcatcagttgctgctgttggatatatttttaggttctaaatatatcttacagggacaataatatcatcatctcctttgccaaagcagaagataacatttggcagtaaacactgaatcatacgccttcccagttcttccgagatttcctttcaaggccttggcttttccacataaacaatatcctgtcttgggttttccacaggaaaaccatctcctgccatcttggtgcccctcactcacttcaccttctcaactgagaggctgagcataatacttactccttgaataatacatttgtctacgtgttacagacatatcccctgtcactcaggaggtcctaaccagagagtaatcattctgatagaaatgggcaagtaaagacatatatagacaaaagattaaaattgtttggtcaatactggaatccagcaatcacacactaatggaagtatctcagtttttaagataatggtaaaattatagacatctataatatttcacattaaatataaaatgagacttggttggaatctatcacgtagatgacatcaaagagctctccactgtaaaaagtcatttcttatatttgacatcattttaaagtattctatgtgcatatatgcccttgccagcatctaaaaggcttctatcctgagaaatttctttcttttttctttttttttttcccagacagagtttcactcttgttgcccaggctggagtgcaatggtgcaatcttggctcaccacaacctctgcctcctgggttcaagcgattctcccgcctcagcctcccgagtagctgggattacaggcatgtgccaccatacctggctaatttcttatttttgttgttgttgttgtatttttagtagagacagggcttctccatgttggtcaggctggtctcgaactcccgacctcaggtgatccacctgcctcggcttcccaaagtactgggattacaggcataatccaccatgcccagactatcctgagaattttcaatgtagagctattgttttataagcaaaaatgatcaacatttatattttaatcattataaagcaatacatattcgatttgcttcatttacaaaaggcttcctggacttagccctttaaaaatgcacgacacttaatttttttttaacaaaaaagcagaaaaagatgatcaaacgaaggatactgatccatcaattactcctcaggaagacaggtggatcatgtgtgatttttcaaatgtttcaccagattgttaaaatgattaaatgaacaacctaagctcaacttgaaatccatacagatgtgatagcaccataaccatttcttaccctctggacactgtagtatggttgcctctggcatctttaacttggttggctgataatatttaatataaaaatcttcatggggtgtcaataaatgttagctttctactccctttctacaataaaagccattaaatcatgatttattacaaaaatgtgacttgactgattttcccatgttatacatccatgaaatgtaaacatgaaatgctaatataaaagaaaaatacaagaatatagattttactgttaatggtgcctattaaatgttggtataaaaataccctaagaaaatgcaacaaaatattaatggtggtagtgcctttaactggagggattaaaggtgatgtttccaagtttacataatgattgtgaaatactcctgggatagagaaataaaattttattaaaaatattattatgtttagagtcagggtcttactttgtcacccaggctggagttcagtggcaccatcatagttcaccgtaacgtcaaattcctggccttaagtgatcctcctgcctcagcgtcccaaaatgctgggattacaggcatgaaccaccatgcctgacccaaaagtttatttttaaaaacataaattttaaaaagataacataatcatatctcacttcactcattaaacatattctagaaaatgttttataatttaatttttgtttttaaaaagttcgaaggccgggcgcagtggctctcgcctgtaatcccagcactttgggaggctgaggcgggcagatcacgaggtcaggagttcgagaccagcctgaccaacatgatgaaaccccgtctctactaaaaatgcaaaaattagctgggcctggtggtgtgcgcctttaatcccagctactcaggaggctgaggcaggagaatcacttgaacccgggaggcggaggttgcagtgagctgagattgtgccactgcactccagcctgggcaacagagcgagactccacgtaaagaaaagaaaaaaagtttgaaaatgtcccaaagaagctaactactctccctgtgttttcccagccatgctgaattacttgtagttccctgaagcatcatgctaattccaactctgtgccctaataggtgctgttgctgatatattaggccccttgctctatgttcctcatgtaactatgagttttccttcaaaaccttccccaggaacactttctgagttctccactacaatataaatgctcatccttcggagagatccctcaatgaatttatcaacagtaagcactatcacactataataactgtggaaagtgatttaacaaagcacagtgccttctgaataaagaaatgaatgaatggataagcaactttgacactcccataacttaaacaaatggttgacctttttgttttctctcacttaagtgactggctgtttgactcgagtagtaaaaacaaactaggtgtcttgacaccctaaaaagggtgaatgttatctacataaattcaatctatacatttaattaaatagtatcattcaataagcattaactgatggcattgtaagtgccaggtttggtgttaggcactagaacatggaaaggaggaacagtgcttctttcctcaacaaactgagactaacaggaatagtcaggcaaatccacagttgcagtagtgttattaagtgcagtgttgaagcatgcactttctgtagcaggaacaaaaaggggtgctgtggggtgtggggacaagccttcttggttccaacactgtgttaaactaaaatgtagttgtatttacaatacaaagcttaataaaggctgcactggacaattgcctaatatcatcaatgtaaatacccaatgttatgtgattagaatgggcataaaaaataacaaaatctgctgttattaacaatgattcccactggaatattggaagacacactgactatcactcactacagaaagtatagaattggaaaagataattttatgaagatttataaacttttaaaactggtgtgaaagtattatttcccaaattcagtttgtagctggggtggggcgagtaggtagtataaatttcttcttaaattgtatcatgacagagaagtgttctttaggattccattgttgtggactaacaaagtcacttttagatatctcaaatttgaactttattgctcttcctatcttccaaagaaatgcactgaaaaataaaatggtctctctacagaagaaccaaaaagcacaagcagttttttttatcctcacagctttctgttttcaagcaatttggagtccccaggcggattcaaactcgatcccccttccacctcactcgggctctatgcactcccacagataacgagattgggtgagcacatcagattcactttccaaaggcacactgaaaaatcttcatgcagattaaaagatttttttaactatttcagcttccacatcttccaaacttctctttctcaaaccatagaacactatcatttgtgcagaacaacatgaagatgggaggttatggttccttcaattatgtctgagaattaagacatatgttatatatttactatgaaccttaaagaataaactgcacctagatctaataaccataattctaaataaccttctataatctattatatacatagtagccagatagacttctaaaaacatagctcaatcagcgctcaaaaatgtggcactgattgacagtgtataattctcactcattagttgtggaataaagtccaaaccgccgttctagaattcaagctcctcacaaactggctccaatctgccttcattgttgattaaccacatgtcccttgcaaaatctacgctccatccccaagagactctgtgttgttctctgagcattcagagaactcttccacctccatgtctgccctctcacggtttttcccacttgactaaccttcctcccatttcacctattcaaacctaactcatcagaagccctcctctctgaagcctgtctagattatcccacctgagagcaatgtctctgtcctctacgttctcactctgctggcatacatgtctcttgccacctctaccacatcttgctcacctttgtaagtaaacctcaccttgctcacctttataagtaactgttgttagcacatactaggtgtacaacaccacacctataagtgagtggctgaatctttttacaaaatgattcagaaggcatctcaggattatttcatttctccacataatcacacatatcgactaccattatttgatagattcagaggttgcaagatattggttgactatatattcactctttaactgatactaaaagttgttttagccagttaatctctaatagcagcttatctgccacttatttgattctcatataaagaaagagtattaaaaatctgatgtttgaatatcctacttacataaattcaagaaaagcaggggtttagcatatctgccaccctgaattcaattatctactgcatgtgttgtctctcatgtgtaacctgggccttgatgctaagccacccctcagagattctttaagttccaatgtcagaaaatttgagggtcctatggcatagaatgataagtaccaacatggttactactgaagatgttagtttggaaatacttttagatcatggagtgcttaagtgctatacagtcatatcaccaatagccttaccttttccacaagattttttttaacaaaatgtaaaatacaggtactgtaattcatgaattctcacataaaggacaaataaaaataggatcatgaatattgctcagactttgaatttttatactgtaatctaagaatactctgaaggacacaaatcaaattggtagggccaggaaataaaataatttctaaattctactaacagtaaaaaacacaaatataaatcttattaaggcagaaaataaaaaacaagagattttcaccatttagtttcatcgtttaaatatcatatttattatcatacactgcaaactccccaaactgctttgatattttcccttaaaaataagagagaaaacatgaaggcatctgattttgtgataatagaaaatttcttgataatatgtttttgtggctataagtgccaatgaatatatcaagttctaaataatatgcaatgttttaaataccaatgaatgttgtgacaatttttttcatttaaattgtgatgtatgtttgcaagatacagtctacttcctttaagctagagaggcgcctgtcagcgcctgtggaggcctaagaggaggaggcttacaactgcagtcttctccttcctccctgaccccgttgtaggaataagaagtaaatcttcagtcagaatcagcccatgcacacacaagccagtggcaaacctctgcccaagtattaaaggataaactgggcaatcagatttgaatctcaaaactctggactaggaaatcagaagaatgaactactgtaagtcaatgatatgaacgagtccaagagacaaagtagagggggaaagctaatcagtagaaaacaggcagatgaagatgcctggagagaagcagagctgccaacggagaacagacgcgagagctgtccgaggtcctgataccctgaggttctgattccagtcaacctgcagactcacatctatcctgaaatgcaacccaactccaattccacagagtcacaatgtacctaaattatttggacagacacagaagtcataataatataatttaacctactgataggccctgtgacaaaaaggcctaggcaaatggtaatttttaaaagcccagtctgcctgagactgaagcccagctctgtcatttattacctctgtggccctaagcaagttatttagtctctcttagtctccaatttatcatgtttaaaatggatataatagcaatgcctcaaagggttgttatgagaaatgcgtgagatgatgaatgtgtagtggttagcacagacggctccaatgttagacgatgatcaggagcatgatggtgacaacaatgatgataatttccttttccacacgggcatagtagctcaatagagaaataaattagctttaaatttaaactaactctatttacttattaccagcttgttcacttaagaaataggtagactattatagttaagattttaaaccttagatgttttgccttggagacagtttgggatgaaagaaaaatatataaaagcaaaaaaaacaaaaaaaaaagcaactttttacttaaaacctagattctttatttttcttcctaccaccacaattgattctaaatctcatgtataatccattttctctgcaaaaagtataactcatgcactcattcccttcatggagactttatgagggcctcatcattgaactttctgtcttctaatacgtgtaccctttttgcattgcatcagaagaaaaacttctaattcacagtcacctctaattaaatactcttctggaacacaccactgtctgctgaataaagaccagatttccttagaatgaccatggcaactttttacagtctgatctcagttcctcaattcatcccctactcatccctaccagcttttcatggtccttcctcatatctattcattttctctggcttttttccttgcccaggatctttttctgacttacaggtctggataaagacacaagtttttggcctaagtcttaaggttcagttcaaaagctctttcttaataaaatgcctcttatctttatactctgacctaatgattttcttttccttggtcatagagtattctgtatttctattaaaagacatcacattctactataaagctatggacacatctttccaaaaaagcagtagctatattttaaataaacagtgataaaaaataattgtgaagttcataaacaaggtaaccctgatatgggaaaattgttggtaaacacatttgaaactattccataggatgtattttaattcctccatgttcccatccacgacctgactctaaggagataaaatagaatcctgttgctacgggggaaacccaattatttaaacaacaaagattttctctagttcaaggtgaaaaactttcctaataagttggtgctcttgagcacaaaaagatgaaattagatataagggggaggcactgaaacccttttcaatgaattcttattgagcgatcacagtgatccaaactagcagaggatccttgtgcctattagttacacagaactcataggccaggtactattttgctattgaatctgcagtttggctctccacagttactcacgctaagctataaacataaaaatgaaaaatgaccataggacggtaaaaagggtactcatattgatgatatgagaggcatctttcatgtatgcctaacacactgccagtcacaggtgcacacacttaaacctgctttcaaataaatctctactgactttcactaggaaaggagaaacgtgtctgttggcaagaggttctcactccatttgggttattggcaacttttatacagagaccatttggcagactccatgacatcatgcagggattttagatctgatacttgttgtgcatgcatctctcatgttttaggacaacattctgatcacaaactattctcctttttttcagttatcatcaaatattgagacacatacagaggggaagggaggaggaagaggaggaggaaatagaataaaatatctgtaagtctcttacaggaaaatgtaatttttctcacttctccaggcaaacaggatgacttggaacaaccgttacattttttcttttttttcactatgctcctctgctctctactcaagaggctaccctgttaaataaactaaaatacagagtgatcggatctactgataaaacaaagtaagctctttgttgcttcacccagcaaaggtcactttcccagtggctttcagcttccccaggaaagtcataatactttccaaagcactcacattcccccgcctaggatgtgtactcaaacagaggtgtctctaggaacttcatctccggtttcactactaattggaaaatactgagggacagaagaaatccctcagcagtttcctcctgggaccctggttgcgtacgtacaccagctccttagtgagatgcaaaggatgaccactgttaacctggcttcctctcaagatcctccagaaagaattggataaaccataggctaccttcttgctctaaataacctcctcttcaattttcacatcagcttattaaaggtagagaatcctccagctataccacctgctttctttgtttctccgtgtatcagtaggcctgtctacaacagcattaccaaattgtgtgtctatttattgtctgtacttcaccttgttctttaaaaactgtgtttaatatttacctacattattatttgccctatgttttatcttttaaaaacatggaacaccaattagaaagacacattaaatgtcaacaattagtaaatttcagagaatcaaaaataacagtagaaaaagtaggattaagccaggtgtgatggatcacacctgtagtcctagcactttgggaggcaaaggtgggcaggtcgcttgagctctggagctcaaggccagcctgggcaacatgttgaaacccatctggcacacacctgtagtcccaactactcaggagcctgacgtgagaggatcacttgagcccaggaggttgaggctgcggtgagctgagatcatggaacagctccccagcctgggtgacagagtgagacactgtcaaaaaaagagaaaaaaaattaagaaagagagagagaaataagcaggaaggaaggaagagagagagagagagagaagaaaggcaggaagaaggaaggaaggaaggaaggaaggaaggaaggaaggaaggaagggagggaggggaaaggaaggaagaaggaaggaaggaaggaagagaaagaaagaaagaaagaaagaaagaaagaaagaaagaaagaaagaaagaaagaaagaaagaaaggaaagaaagaaagaaagaaacacacagactaagatcaagccataggtacaggtaggtaattagaaattagaatacctgccatgtaggcccttatactctgttagaggcaggccatagatatcaacttctgaacctcctggtgtttaaggacacatgcctataggaaatatagcacctgaaataaacttcataaaactgtttattatgaatgttttcatattgcaatgatgaaggcaatgaactaaatagcctaaagagtaaaaacatgttattatgggattccttattaaataatacataacaggcaagaagaaaagccaacagcataagttttcataattcaaccaagtatagggacatcagttgttacttgagctccatcatgtgtcattattataatgacagaagtagcagcatcaagaactagatccccacaatacatctgtctgagagcctgtatcattcattgccaaatgtgataagaatgtgaaagaatgctacactgataatagttttcatggtggaaagaaaagaaaagccattaatccagagcaaaagttagaaataatcaagaataaacgtatgtaggtatgttaaggttttatgactatacatttacagatgttttttaaactcttattattgaaattcctacaggaaaaatagctataattacagatctaaattatcctttttcccaatacaataattatgcttaaaactcaatttttgatagaaaaaggcttcttagagtacagctaccacattctagtacagactgtaaaataaagtaaccatattttcaaagcagaaataacatatggcttgaaaaataatatatgaatttggaagtttgtttttataaaagagtacaatttatgtacatattaaattacatttgattttagatttaatggctttttggaaaatttttatgaagtcaggattgttacaggaaaatttggaatgtagattttgctagaggtggatgctcttaaggactgtttaaaaaaaaggtctcacccaagtttttcataggaatctattcctgttcacatttttttgatatgtggtaagggattgtatttggagtcagggctttgccactggctagtaaccttgttccaatcatttagcttctagaaagttttatctccacatatgtaaaataaaggaagacctggtccactgcatgccttacacttttgtgatgctgtggacttttgagaagaacactgctcacttgtccactttcagccacagtacagctgcttagctacaagaaactacaggcccagctccactcctaacatgggattcatatctgtcctagtggactggaaatcaagtctttgtgccaatgcaaactcacataaccatactctgatggccagcactttgaccaggttaatttaacctgtctaaattttcaccttctgcctgctcactcctctaattttcaccttcccatgaccagctggtatcatggctgtctgttttggtgactgacagctagggactccagcatggttttttatctcctaggcatggctactatctgggatgcttgctctaataccttacactgtcttcttgtaacacagtttcttaaggcttgtgtctctatagaaacatgtcagaaaatgctatcttattatccctacccccaaataaatctacagtggggtcatttcatttatgaaaatactctggaaacaaagttgatgctcaggcaactggtctaccagggatagcatgattttttttttcttctctgcaatacctatgcacaaacttgtatctagaaatcaacaataaatgtgaaatggaagtcattaccactcaccgtcacaaataatgttttctttcattttccatatgggcaacataaaggagtgaaaataaccattgctgttatgcacttggtaggtttccatctaataaaaagcttcatatctgtaaaatgccaataacattcagtctatccttcctcatttccaacttcgagatctcatttatcccctactgttttcaggggttgactgaacttgtatccacaccaaaaccttccatgcccaagatactagtgagttacaaccaataagtattaagagaattacagaaattttgcatatttactttgacaggatacaaagatactatcattagaaaagtgagaaaagtctgtttgagtgggaagaaaagcattctgtcaataagatcagaacatgtacaatagtcagttggttgcttacggagtttaaaatttccaaatgctttagagcccagttatactgcctgggagtcttcagagatgggatacccatcactaatattaatattgatggtaataaaacctgtctccttccagcattaccctacacaaaagagttcttcttgtgataatgcaatgaagcgctaatcctctacaaagggctcggtgatatcagaataccatacgttccctttaatgttattccataatgaccataaagtgcctaattgtcaataaccacttaagaaacaggttctcttgggtccttaagtgctggataatgtggtgctgtcctcagtaccaggtaaaaggaagattttttttagctctaggaacttaggtgaaatcctggaaacatttgacaatgtttcttgtgtgctgctggtggatggatcatagatataaaacatacatgatggtttataactaggctttcccattgtatagcagcaagtgctaatcaataagtcaataaaaacttgatggcaatttttctttgttttttttttgtttgtttgttttttgttttttgtttttgagatggagtctcgctctatcgcccaggctggagtgggtggcgcaatcttggctcactgcaagctctgcctcctaggttcaagccattctcctgcctcagcctctcgagtagctgggactacaggtgcccggcaccacactcggataattttttgtatttttagcagagacggggtttcactgtgttagccaggatggtctcgatctcctgacctcgtgatccacccgcctcagcctcccaaagtgctgggattacaggcgtgagccaccccgcccggcccttgatggcaattgctaactcaagtgagggcccataactctctcatctgatatgacctgctattagtggtagatgtcacacatctgagggtgaaagggaatataccacatgatctatcagattcaaaaaacaacatgatgaaaagccaaattgaatttaataacatgtaattaagtagatttatgtataaagccagtgtgtgggtttaaataacccatcacttgaagacataccagttatacagaagcttatctgaaacaaacctgaagtctccctttgactgcaagctcagtgtgacctgaaagtgtaacggggacaataaaacaatgaagctcttgaaaacactcatgcattaacagaattagagtatccagaaagtgggttgtaaaagttccactgtacactctattagtcaagctacccctatagctatatttgtttatggaaactctcttccaccctagaatctaaaggcatatattcttccacaccacacagcaaaataaaacgctgtttctcaacagactctggggactccaacagcagggagggaggtgtcaggggcaagggttgaaaaactacctattgggtactatgttcactatttgagtgatgctttcaataaaagtccaaaccacagcattatgcaatatactcatgtaacaaacctgcacacataccccctaaatctatttttaaaaaccctgtttgtatttacatgtaacattgattttcattggtccattagtacatctctatttagcttgacttttccatgattcctatattaaatgtgttcttcagtagaattttccttctatttatttaaactctttgttccagcaaatgtcaaaagccaactaaagaggcactttaaagatgctgccaacttcagatcctctctatcaaaaatggaagaaagtctaatttaagaaagagggtatttccactcacccattgtgctgctgattattgaactggaagtaaccacaaggtctgcaaaacctctgaacttcattttgaggaagaagaaatgctagtcaaaatttacttagaatctattaaatttaaagtattataatataatgattgaaagaatggacttaaaaaaaatctaggtttgaatcctggctctgctacatgcaacttagctttggcatgttccttaacttctccaaatctgtgagtagtttaaggattaagttattaatatatagtatatgtaaagtgcttagcatagtgactcacatatgataaaggtacaatatagtttcactattatgttgctgccattgatattatattattattattacttattcacttgcatactgtgagacaaagtttagacttgagatttagcaattgtgtttgttactctagttctgtatttacttactagttacacctaatgcagtatttctaacaggaggaatgtaaataagccactcttcaggggtagagctcttgacaattttactgtcagctggaaatttgaccaggaatgtttcagagagaagcaaaatgagcaatacagcttctattcagatatccagagttagggaggcgtaaggtgattattcattcattcacagcagaaagatgtatggtaatgcagagacgaaaaatatcagtgtcactagagaagcatcaataacatgctgagggatttcagcagatacaggaggaaacctgctggcctgggaatgtttaatttgtaatggactaagagaacaatcgagtttccaaaattgtactttggctacttccattgctgaatttcctttccagccactgccccctcgacctctgttacagtctttacatttttatgaggttgactttcaaacatttattccaaagagcaccgtgtagtttttaaaagtaatcatgcaaggaacagtaatggaaatcgtaagcacaggactggagttaagtgaagcatcagccagttaggggctgtctagaggaggcccacaggaaggataatggatctgcaaaccacatcatgtgacatatgattaaatgaaacagaaacattaatcctggaaaagagaaggcttagggaggccatgattgatgttttggtgtaggtgacgtgatcttgtgtgaaaggagattagatatcctatgtaaatccagaaatgtacattagaaccatgggaaagaatgccagaaaaatagattttatattaatgtaaggaactaatttataatcgtttgaggtgtccaaccaagacttcctcctgaagatgtggactccttcccactaaaagaagtcatagagagggagaaaattctggcatgcgggagagggaggactgaatgagacaacttccgcggccccttcaccatctaagagtccatgaagtatctaacacaacgaaacatttcctttttagagaaaacctaattaattgtggaaagctgttaggaaaacttgattgtgttttatatctcccatctgcatatctgtaagcaaaccaaaagcagaaacttactggcagcttcaccttctttggcgagtttagtattgtcaatacagtaaagcctctcaattctgcatgcaatttgacatgaacagaaggaagaaaaaaaattagaattccaccttcagaaccacctaggagggtgtctgacattgaacaggtaatgaacaatgaacaggaccatttccccagcagcctttgttttccctgccacctgcaagggatggacagttttatttcacaatgatgaacagtgatgtcgggctgagccctccactctgtctcaattcactccccacctggagggaaagggataacaaatacaaggtcttattttgtttttgaagggtctttcagggacaggaaaagcagctgttgtagtttagaacagacttcaaaagcagatcaatagagagccagacccaggtgctccttaaaggcatcgactgctacaatattgtcatttgcctcccttagctttctctaccactttcctctcaagccctgctagactactggttttgatagagtaacactctgttgtgagatgggattgtttaaatgagagaaagttcacatgtggaaatctgccatggggaatctagcagtaactagatatgtcccatttgggtcattccaatttttatttcaagtctgttagaacagatgtattcaaaatgacatctagataaggccaggcggataagaagagacttcagctgggacaagaactactttgtgagttagaaaattgggttcatgtttccatgtttataatcttggctaagtctgtaactgatattcctcatctaccatatacaatgaggactgctgtgaggactaaaaggaaataatatctctggaaacactatgtaaaatccaaaacactgtgtaagtcttagatacggcactcttttactacacataatggtcatggtttgactgaaatctcaacaattttacagcgaattaagggaattcactgtattttcttattttcattaaggatattaaaactatttatatagataatatactctattagcaagattattaaaaagcaatttttagctttagatatcttctccagtacaaagcttttctctttatttttgcatcttagttgtctcttcttaacagaaaaatgatcctttgtatttccgtatgttaataagtttctgtgaaagttagatgacttccttacaaatagtaattaatattattgtaatagcaattataatattatagttttataaacattggtgctgtgatgtcaaaccagattaatatattgatctgtatatacatatatatagtatatacatacatatatgtatatgtatatgtatatatgtatactcttgaaagtattttagtactccgtcgcttccccaaaaaggtaaactagatattaaaactctacctaggataaacagataatggacaagaagagtaaaagctttttcacaattcttagcttctgcactgaagttatgaagatcgtggttaactaaaaagttaaaaatctttttcccataaagagtaatcaagatttccactaatcacaaggccggtggttgaaatagcaagattcatcctcaggcttgcactttcttgttgctggagagcaatggggatggggaaactctcggtaccacggtcctgggattggctgggtcataaagatcattccacaacatgggattctttgatcatctcagtgatactccccccagcctcaaatgctcagggcctctgagccagtccacctctcagaagaggaaacctaatatcccgcaggggcccattccacagtgaaaggctgttagttggaaagttctttttaccttgcagggcaatacagtgggaagggactatccagtaaaactcctccaaaacagtagtaaccactcaattcatgaagttctctttctatactgcagttttctaaagtaacataaaaatatccatggatttttcactttcctttgaatgcggtgaccattccttacctttaccaaagaaattgcaagaaaaaaaatagaaaaaaaagagcatctcttggcaaaaggtcccatcagtaattctagttatagaatcccttcaagaatcattaattgtgttacactacagaataaaccaaatatttatttctgcaagcatcattaaattatgacatattagaagtcattaacaatcagcaggcaagggcactgggttctgccagtttaatgttctgaacaatcaaaaataatatccatggggcaattaatttcctgcacattgattattccaatctccacactaataagtggggctaaaccaagtaaaatcaaaacagcacagcaaaaaactgcagactgatcccacttgtaaaggggagtctgtaaccttgacagatgaattgtatttcctaagttatagggggagaggaggaagttattccagcaccctaaatggtatcttgaggagctagcatgatccttacatccactatacccctttcacacacagagatacatgcacatttcacaaatgtaagaattaagattcaacagattgtccaaatcaagcccctagtaataatgtcgggaccaggatctttggattagttctatgtactttccactctgtgggcaattcaatggatgtttaatgattctggaattggagaaaaaacaatttctattaattcaacaagttccacagcaaactgcaaaactgccacttttctctgggtttgaggaactacttattcataaaatattagtcaaccaatgtatcaaatctgttgttaaaatgttatccagaattctaaccctttcttccttcatacattctttaatctgtcaggcatttaataaatatccactaaatttatcaagtgatgtgttaggtcctattggaacacacaaaaatcacaaaaagatcctgttcttaaagagctcaaaagattttaaaacacacacacacacacacacgcagagtgatgtgctggtagatgctcttcatcaaccagttttccaggggctgcaggagaagccttgatttacagcatttgccacttcccatgatacaaatactccaaccatggctaatttcaatttttcaacatcaatatggggttgtggattcagggagatattaaaaactgtctaaactggctctagtgcaccactactgatacactgctgatatgagtgtgtgtttcactatataaaagaactaatcaaatattttagagttgttatgttagagtagtgtgattatgattgcttcttcttcttctttttccttttttttatagcatccaacattttttatgaagaagactttttttaaagataagtactagtagcaagattcttatcccagaccactttttctacatagccttggtataaccaaaattatctgaggagtagagaggctaaaatattttgatggcacatcagattcgctttagagccacatgtcccagtagaactaagaaaggaaatgctgcagagagtgtccaacttctaagaggcatcatcagacttcatttagcactaagtcttcctgagccccacctatgtgaccatatgaccacctagatcttacaaaatatatttgcagagcatgccacctccacacattcttaagattttgaaatattcaatcataggatgtatgtgaaagaaggggaggaagtagaaactaagagaaggataatccctaaaacataggaatccagacagaaatattattgcttctgcagaaaccctaggacaggattgaatgactcaccacctgtttggttttatggttacatttcaacagtgtctgcagctgtaactcatgcttcctccttcggctttcttaacacacagatgcactctgttttggaaccaaacatctttgtcccattccagaaactcttttctttcttaggactatatgaatgattaaccctgtaatcttcaaggttatttattatcatttttaatgtgaagaagtggaagttttgtggagggaaaataaaacgccttattgcttgcataacattttaacatttatgaaacaattgcatgtaacttatcacagttatcacaataatcctctggaataggatattcctggcaccttcatatgtgaagataaagaggctcagagagtttaaaagactcactcaagttcacaaagccacagagtggtctctcactgccttaaacacatgggcttcagaatccatattccaacccagtagggaagtagcttggtatagtttagagaaaaacaagatgtggagttaggcaggctagatttcaaatcttgacaccaccattttccatctgtgtgatcttgggtaaaatccttacactttctaggcctcattttcctcatttgtagcatggagagatgacactcaccttactggactgttaggaaaatcaaacaaaataaaatttggcataagatgggttctcaaaacatttcttttctcttttccaccattctgtactccattgttcatgcctcttgtccttgtatcatccttagttcaaacatactcattttgtttcttgccctgactcaaacggcctctccagttgaacaaccagaagttgaacaatcatttaatggacagtgtgttctaccagagtatattgctgtagcaagaattagaccccacacaattgggaaatcagggaatcactgcagtctaacatggaagccccactggttcctgcacaatttttcttagcatactgtatgttgtgccaccaagacacagcagctcaacacaaagtacacacagctaggaggatggacaagtcatgcagagatacagtactgaatgtgcggcccattataccacgctcttcctcttggctccatctcactaaatgcacggtttccaaagtatttattgcacacttcaatgcacaaaacacacaagcaaacactcaagaaggagccagaaccgttttatactaagcctgtcactgctcctccacctgcaaattctggtgccaatgctcctctgacttcattttcataactcaggcaactcagtacttccgtacatactcttccaccaacctaccttccccttcaatttgaaaggtaaactcttttatttactggattatttatttgcagggacattaacatgttcttataattgtgctagtattttccataagctcactattgttttggttagtgtttaattataacattaaatgttttgagtgtttaaaatgttttgagtaatctgttccaattctattttcctcaaaacgtcagttatttttagtgagtgatttttcagaatgtgagatttttaaaaggaatacatgcattatgtgatggcaagaatgctcatattttgctttgttgtgtagctattttttatatattgaggtgccacaaattgatgtgcttatttgactctgttaaaatccaactcaggaggaactcatctccatggttaagaatgtacaatttccaccaaagatagtaccgaggggggaaattcatactacttttcataaatatgctaaaccaaatgattctaaacataaaatagtgtatccaatatagcattgaaataaatctatccagtactggcctatctctacaactttaagcagcttttgctttattatgtaaaagcattccatttttaaatcagctaaacttccaagcaagcaaagacattacaagaaaagattcttcagctacagaacctgtcacatgaggaaccaatttccagggtaagaaaataagctcaaatattttaaaaaaatgtttcttcttacccctagcatactgagctggcagtataatgaatcagaacattttcatttgcatttattctttgacatgggcaaatgacaacctttccaggctttcactgtaggaaaatggcaattttaaaaacttgaataactatcctattaattttatgaagttgttataagagataatatatagtatattatatacaaatatatgtttatatcttatatattaaatatatatatgtatactggaaattacttgtaaatctgtttacccttcaatcttgagactgtacagtactctgataaagaacatattatcatcatcactgattccttatccccagccacttttagcaaattgccttgcacatattaattttttttaagttctgtgatacacatgcaggatgtgcagatttgttacataggtgaacgtgtgtcatggtggtttgccgcacctatcaactcatcacctaggtattaagcccaacatgcattagctatttatcctgatgctctctgccccccaaccccaacaggccccagtgcgtgtcgttcccctccctgtgtccatctgttctcattgttcagtcccacttataagtgagaacatgcagtgtttagttttctgttcctatgttagtctgctgagattgatggcttccagctctatccatgcccctgcaaacgacatgatctctttcctttttaaggctgcgtagtattccatggtgtatacacaccacactttctttatccagtctatcactgatgggcatttgggttgattccatgtctttgctactgtgaataggccttgcatataataattattcaataaatgtttgctacattaaattgaaccatatgcataatcaaagtcagagtctcgctgttaagttgtttaaaggactagatttattcctagagagcaaatagattgttcttaaaaggcactggctatggctgttgaattggttaaaattcagtttggatgcaagtgacagaaaacacagattgtaatatcttaaagaaagtataagctaatttttctgtagcaaagaagtttatgtaggcaggtcaggtatggtgaccctgtaatcatcagggaccattgttgttctaccgtcataaactctcagcttgtatctcctggccaagatgattgcattctggcctgcaagaaaaacaaaagaaaaacaagaaaggtgcatgccctttttttaagagcgctttctgaatattacatcccagctgtttgcatcccattggctggaatatattatcttgccatgcctagcagtgtaggagcctgggagctataatctttattctgatggccatgttcctagataaatggttagtgccattactacagaaaaagagggaaaaaataccaaggacagaaaggtttatcacagtttcataaattgacagtgagctttgagtcaaatcaatacagagcaagtaaattaatttgtttctgataaactttcagggcaagaccatcacatgtgttttaaggatgtagataattctagttaatgaggagagttagaacctatttccaacagataaacttcttttgttggaatccattcaaattcccatccctaatgatctatactaaaacttaatactaagccacaccacatcgattaaaagaaatattatgaaaagaatgcataattgcctgagactaagatatcaggtgaaaggagagagctggttgtaataatcttttcacacaaaaccaagtgaatggtaacttttttggttataatcaaatacatctctcttcttaccctcagaatagagggaatgctgtatagtcactaatgctgtccaaacttaagtgcattgggaataaaaggatggggagactaaacaaagccaaagaaataaaataataataataaaataattctgagagcatctgggatattccttaaagaatttataagattcttcaggagatatgggtagcttgccccatccgaaaactccaaaaacagttatttcataggtctaaaacaactaaaactgaatttattttcactgtactattatcttagtatttttcttaattacgcttcatcactatcatcacccaaaagggtcaattattgaggtttcattcaaactaaaaccctgaaaactaaggatggaaagataagaataagcaaaagataagagaaacattcaaatggaaagaagataaaagaaaaataaattagaagaaaaagaaaatactagatagtgactcagagaagtagaggctgaatttggaggaaaataggagaagtaagaaagtaaaggagagagagatgaaggcaagagcaaaaacactagtgacagaaggagttacacacaaagaaaacaaaaggcaaagaggatattttagcagggagatagaaatcctcttacaggatgggactgccagggaaatctctgaaacgggaggcaccatctaggcagcattattcagtaggagaaactgttcaaatttaaccatcgtttggaggacatcaagccctatttttgtgtgatcctgattttccacattaaaacacagaagctcatggagatattccaccccatttacacaatcacgaaatcgtagaaatggtttggtttcttctgtcattgaatttgatccttacaacaccatcgtgaagcagaaattattatccctacttcccatggaggctcagagagagaaactgacttgtccaagattatcttgaacaatgtgagtcccaggtctgcaacttactcggtgtgttgtggaaaagtcacttagcctccataaaaatcatctgtaaagtgaaaataattaataacaagtccacaggttttcacatataaatgggaatatatatacgtacatgtaaaaatacttggtaaaatgaaaaacataatttgtcatatttactaaaactaaaatgttcagtgtaaaaggctacagggagttacatgctgctagtcctttaaactattaggattgaaaatgatggaaaaggagaaggagaagaaggaaaaggaaggaagaaaggaagtaaaaaggaaggaaggagagagggaaagagagaaagagaggaagacaaggaaacagaccaacccagtaacaacggctaacactgtgcattattgtgtgccaggccctgtactaagtctttgctcatttaatcaccatagcaactctaagacgcaggtactattattaccccagtttgcagacagggaacgtgagccttgaagaggtttagtaacttgaccaatttatacagctggttagcgagagagcctggattcaaatccacacaggtacaagtagacactcttcaactcttttttttttttttttttttttttgagacagggtctcactgtcacccaggctggagtgcagtggtgcaatctcagctcactgcaacctctgccaccctggttcaagcagttcttctgcttcaccctccggagtggctgaaattacaggcccgtaccaccacacctgtctaattttgtatttttagtaaagatggggtttcaccatgttggccaggctggtctcaaactcctgacctcaagaaatctgtccacctcagccttccaaagtgctgggattacaggcatgaaccaccacacctggtctctggtactcttcaagtcttatactgcctggatattagtcagctagaaataacagtcctatgagaaagagcgaatatcataaaaatctcactataaaggcaggaataggaaaatattaggcccatcagcacaccagcagctaaaaatattacccccaggcagagatttagcacgtgctattttaacgtccagtggaatgaaggagatctcagtaaatgaaagtaacatcagtcactctaataaggtcaaatggtgctacaagaagagaaaaaacctccatgagattatttcaattgctaatgaaattacaaattagcctttggagctcagttcatctttcctcagcggatagtgagctaataagtaaatgtaaaaagcaattacaaaatttacacagactttaaaaacctccccatgatcaaaaagctagctcagaagtttcaacaaaaacaacagagttttggttagacagaaatcttagtggttgtatagtccataggccaaagcccttcctaaagtgcggacaatccgacctgccttttaaagctgatagattgtccgaagaatatatataaatgccagtgagcacttgaaaagatgctccatcattagggaaatgtgaatcaaaatcacaatgagataccacttcacacccattaggatgactattaccaaagaaatggaaaataacaagtgttggtgagcatgtggagaaattggaacctctgtgtcctgctggtggagatgtcaaatggtgcagccactagagaacacggtatggcagttcctcaaaaaattaaaagtataggccaggtgcggtggctcacacctggaatctcagcactttcggaggcagaggcaggaggatgacgaggtcaggagatcgagaccatcctggctaacacggtgaaaccccgtctctactaaaaatacaaaaaattagtcaggcatggtggtgcgcacctgtagccccagctactcgggaggctgaggcaggagaatggcgtgaacccgggaggtggagcttgcagtgagctgagattgcaccactgcactccagcctgggcgacagagcgagactgtgtctcaaaaaaaaaaaaaaaattaaaagtacaattaccaggtgatccagcaatcccacttttgggtgtataccaaaagaactgacagcagagactccacacagatatttgtatatccatgttcactgcactattatatacaatagtcaaaggtagcagtaacccaactgcccattgttaaatgaatgaataaacaaaatgcagtaaatacattcaaaggaatattattcagcctttaaaaaggagaaaattctggcacatgttacaacatggatgaaccttgaggacgttatgctatggaaataagccagtcacatataatacaagtgaaataagccagtcaaaaaagaataaatactacatgtttctgcttatatgaggtacctagagcagtttatttcatagggacagaaagtcaaatggtgattgcaatgggactggtaggggaatgggaaattattgtccaacaggtgcggagtttcagattgggaagattaagttctagagatggatggtgataatggtcgcacaacaatgtgaagtgtacttactgtcattaaactgtgcacttaaatatagctaaaatggtacattttatgatatatatttttaccacaatagaaaaacaaaaaaaagaaaaagtaaagaagacttctttgtgtaaatatgaaaagaaattaaagcacgttgagtaagaggtgtcccttacctaaggatccaagacaaataacagagtaattttatttacctttttatatacctttatcttctttaaaagtgccttatgtacaaactaaaaaaatttatatcctaaatgatatacgggatttgcttcaaaataatcaactggggcatagaggaagtggggaagtagaaatgaaacaagatttacctgtggtgaatcattgttgacactatgtgatgtgtgcatgaaggttctttatattatttcctccactcttgtattcgtttgaactatgccacaatgaaaaattgtaaatgttgctttatatttaccatatacaacagttttaaacaaaatatcaagccactgaagagcagtgaattctaaaataaggtaaagaaaatttttaaaagaaaatattccttagatgtcatcacttccattggtaggaaaatccatgtcccttttctggacaattacaatgaacagttcacatacactgaagaactgttatttatacaagctttacatgcactgttcacataatactaacaatataccactttacagatgtggaaattcagactcacagaggtaaagtaactggattcacgttaagtgcattttaacccagacagtctggctacaagcccttcagcttaacaagtacatttcttgaattacgagggtatttttttcttctttcctgctagccaatttagacagcctcaacaatcctgagttgccagaattagaaaagcctgattgagaacctatgaaaagaggtattttgttttttaagggatatgatcaatacctttgcctcatctgtcacagtaaatccctgaggagtttcaacattagcttaggtcaatttagttcatttactgagcacctactaagtgtcagaggctgttaaaccttgggcactgtgctaggcactcagattcgcagaggaatataaattattcgattatgaagacagatgcatgcgaatgctcattgcagcactgttcacaataacaaagacatggaattaacataaatgcccattaataacagactggataaagaaaaatgtggtacatacacatcatggaatgctatgcagccacaacaaagaacaagatcatgtcttttgtgggaacatggaagtagctggaggccatgatcctcagcacactaatgcagcaacagaaaaccaaacactgcatgttcttacttataagtaggagctaaatgatgagaacacatggacacatagaagggaacaacacacattgaggcctatcggagggtggaggatgggagagaggagaggatcaggaaaaataactattgggttataactatgcttaatacccgagtgaagaaataatctgtacaacaaacccccatgatatgggtttacctatatatcaaacctgcacatgtaccccagaacctaaaataaaagtttaaaaaggtagtcagtgaactacgacatgatactgtattgaaaactaaaatgtaatcatgaaggtggaatactagaattccctgagaagagtttttataaaggtaaaaaccaacatattaacatgattgtatatttatctggaaataactacatttctcaacgcctatttttctattataaaagtgagtaaaatgaatattgctcctacttaaaagatacattgaattagagactattgcaatataaactgcaaggcctggtatggcatcttggagaagaaaaaatcacaaattccaatttccaaatcaaagaagcaacaaatcacaataaaaaatttaatacttaaggccaggcgcacctgtaatcccagcactttgggaggccgaggtgggtggatcacaaggccaggagattgagaccatcctggccaacacggtgaaaccccacctctactaaaatacaaaaaataagccaggcatggtggtgcgcgcctgtaaccccagctactcgggaggctgaggcaggagaatcacttgacccaggaggcagagattgcagtgagccgagatcacgccactgcactccagtctggtgatggagcgagagtccgtctcaaaaataaaataaaataaatacttaaatgtttctatttttcaacttgcagagtttcaatacaaatgtaaaacatacttaaaataggtgtttctattacattatttgctatcagagagcaataaaaataaaatttgataaaaaaaactgtcaacagaaaatagaggttaacatagtatttattttagaaaccagaaaaccaaaaataaataatttatatcagtcagttcttcctctttcatggtattaatcatcctatgatgaggtgcttggcatctgtgtttgccatggtaaataagctccgcgatggttcagacctatctgcactgtccaaaactctatcttcagcacttaccatacacatagctgccccatacacagccaaggccaatgcatatgtaatgaatggacttgaattcgaatgtcctgtccattcactcatttatctagagagcaacacagtaaagaggcaagagtagggactttggaccaggcattcattcactattttattcattcattcatgcatctatgcaaccaatattcgaggacacctattttgtgccattgttctaggtcctgagacactgcagtgaaaaacaggtgtttccagcctcacagagctcgacagttctgccactagtcttgggaggtcactcagtctgcgtaagttgcctttcagctttttatttttagaaaaatagaatactaataaccaatatggaagattattttaaagaaaacaagtcatatacataatggacctggcacacagtaagtaaacactcaataattaacaatcaaccaaaagcctaaaaacaaaataccaaatataaaatttagaaccagtgacaaatgacattgatttccagagcgaatgcacctagaaaagttcaaagagaaaaaacattgtaataatattaattatgtgttaatagccatattagtatgaatctattctctctacatggtaccaaattttcttcaaaatcccttggcatacaccatcttaagcattaacaatgaaaaaatgtccacagatttctgtactagaggaaaaaatttctatgaaaccagtttggctgacatggagagctttgtgtggacaatgaaggtcatgtagatttgtattgttcttgacatcttctaccaatgagtaaatggaggaaatcatgtcaactgggcttctaaatgatctacagccttggggacacacagcaagcagaggaagacttggtcaggaagtgttttgcaaagatggcttttgcaaggacactaagggaagttgagacacttgcccaagcttgcatagctactcaggggtggggtgagaattcacatccagctcttctgactcgcggtcctttgacccttcatgactactactctgcatgggctatcaccctcctttaaaagttcagagacttagacaagagaagagagattataaaaaatagattccttttataccttttatacctcaatttaaaattctcagaaagggttctaaacactttaaatcccttttacccagaagcttctggtttttgctcagtcttgttaggaattggagtggctgtgatacatctctgagatgctatgaaatagagatgaattgaaatactttcaacatcagcaaatcatctgaggccccataaacaccctgcacagtacattcatggtacatgcaggcctttgtcttactgaaagacaacctatgtcatctgatgttaggagagtcactcacttcagaccactgaaagtttcaaaaaaagagaaaaaaagtcataaaccaagtaaataatcagtgtcatttaccattatatctaccattcccttacgaggccatggtctatggtcttcctttaaaagttctgttgtattctcttgaaaaaaaaataatttgttgaactctactttgttttaagcactgtatgcaactgtttaagtatagcatattgttttatctcttgtcttggacttgatgctatttgttcaaagtcctttacttcctgccactgtgctgtccaatccaatggacactagccaccaagaccatttaaagttaaatttgaattaattaaaattaattacaatttaaaatccaggtcctcaataacactcaccacatttcaggtgttcagttacctcacgtggctagtggctactatatcaggcagtgagcatatagaacatttcggtcatgatagaaagttctattggacagcatcgccatagagcatcaaatccaggacttccagctaagatcagatatgaacagaacgaccaccagaataggtcagactaagttcccaatcttatcgttcctggggttccaagagctaaactacaggtcagagaaaaaaaagcatctaatctatttagaggggttgactagatatcctggtataatccacgatgcccatgaagcaaccaggatgctgattattcactgacactaaattacaaacacaaagtcttagtggatttattgacagagaaagaaagagaggccatagaaagacaaataaataaagacctgaattcaagctgcgtgacttcaggcaaattgtgttacttctctgatcctaaatttcataatctgcaaaatgaaaaagtagattaactctgagtttcctttcacctctgaaattcctggattctaaggctttatatagtttgcataatacccaaggaactgtgcagactgccaagatatataagacaagatgccaaagactttcccattaatgagtagaggaagctgtctagatagggctaaacaatgtaagacgggacattttaagtatcataaaaatggtattaccaatgcatcctacagaagcctcctctttatcttaccagaaaaatatgactggaggtagtggaaacattcacttttctttcattatcaaaaaatatggtaacatagggtaccccacctggcatatatcgggtgtttaataatttttgttgaagaatagtaataagataaaatgataataatattaattatactagcaggcatgtattggaaacctaatatatactaggttctatgcaagacattttccccaggctatcccattctagcatcaaacagctctatgaagaaaacattaaaacattttttatttttttatcactttatagattaaaaaactgcagtgaaagaagttaggtcaccaaaccacagccacacaactaaacagtggcagagctgagatttaaaaccaagacttcccaattctagtgcacatgcttcctccatttccacccattgtctccttaagaaaacttttacttgtcaatcaccagaaaggaccaaagaagactctcaaactttttaggaacccagctaatttcacaaaactgccatttcctatatatttttccagacgacaaaacaacaatgtatctttccagataggccactcagccaaaatattttctagtctagaccaggtggcaatttcagtggagctggaattgagttcatgattgcctgttagtgttccaatgtcctgagacttttgttaattagacacaagacaaagggcattaaaaagaagccaagttaaatttgcatggctgtgggcaaatggcagaaagaagtgggcctttgtttcctacggaactgggcacccactctatcatctacaattattttataattgggttgatattttgtaggatagaagcctgagtaaccctgacatccatatgcctccttatcactgtcatgaagtggaaagcaagggccaattatttgtgttgctcgttttccacaatcttgttttcaaagagacttaacattaaagtcactaaactgtccaaattcaaagtatttccacattctctgcagtgatcacattctgtcacccacacttcctaaaaataccctgctttccatcactcactagaaccacagaggctattagaaggtaataaaatccctcgagggcttctcttttgcacatttgcactttcctctgatcaattagattcagggagattggaagtgggaaataaaagaaataaaattcaggccacaaatccttctcataatcccacaagtagcactgacaaacaacaactggcaaggaaagagctcaaccctggaagactctcctgctctaaactcaattattatccaaaattcatcattaaatgattactcataaaatccttctatctacttctcatcaagaaatatcatcatggaaatatcaatgatggtcctatcttatctcagggtacatgtcagtattagtatcactgagataaaaacagatctgaatatgtttagggtagacaacatcctttggtccagaaagtttctttcaaataatctgatttacaaaagacactccatttaaaaatttttcagaaatggcaagatccttctctcagtgcctgcctcccatctgagcccttaatttagaaatctgagggcttaaaaggaccatgcctttcataatgatcttttacaaacattccttccttttctagtgcgtctttgtcttgttgtcccttgtatatattcctcactctgctaacatgtagtaaacccagacggattaagaaaactaaggttcaaaaatgttaaagatcaactgggcacggtggtgcatacctatactcccagctactcagaaggctaaagcaggaggttcacttgagcccaagagttcaagaccagtctggccaatacaatgagaccccatctcaaaaaaaaaaaaaaaaaaaaaaaaaagccaaagattatttttcacgacggggatttcggcgagaaacatcgacaccctcagcgttgaccagatgggcagtcctgcactgacaaacccactgagttaatgtagaatatgtcagctagctcaatgctaagagaccagtaatatctgtggcccagtctcttccagagaagaaatcaagccactcctctctctggcaagtatgtctcctctcataaaacaggctgacttcagaagtagctttcaaagacaatgcttagatcaagccaatcagcgtaagtactcttcctggttgggtgatagctctcactgtgacttcatataagaaaagccagtggtcttgtcttgctcttcaagaatggagcagtcacggctgggcactgtggctcacccctgtaatctcagcagtatgggaggctgaggcggaaggatggcttgagcctaggaattcaagaccaccctgggcaacatagtgagaccccatctctagaaaaaacaaaaaaattatacaggcatcatggcacccacctgtagtcccagctacttgggaggctgaggtgggaggatagcttgagcctaggagttcaaggttaaagtgagctatgattgcaccactgcactccagcctggtcaacagagcaataccctgactttatttaaaaaaaaaaaaaatagaatggagcaatcttaaccctaaaataacaaccttttgccagtaccaccatatgataccatatgtgaaagatttattcaggtacctgagcttcacaagtaacaaggctggcatctattctcttctccaaaaggcattgtttcctcctttacaactaaataaacagtgcaaattatgtcctcaactttaagtcaggtttgaaaagaaaaaataaaaacaaacgaatgcaaagcaagagactatataaggatgaagggacagcacaggagaatggaggagagaatgggcataggagaaaggtgaggggaagggggagaggggtgaggaacagtgaacttggtaagtctgctatttccaaaaccatgtttactgcagtaagataatgaatgaggaaaacattttcattttcttttctgacagcttgagcataaatgatagctgcaataatatcagaaattattgggcattttgaggagtcttgctagtgagaagccagcattccagccaatttgaagctctggccccaaggtgacctagaaattttgtttttcaaatgcaggaatgtcagctgctggactgaaagtgatgtatactgtctagtggacagcatgctggccagacaccaaatttggagtgtctctccctgtactcagttgttctttacggccagtgctgcccccacaaaggagagttttgtctaaagccgaccaaaaacgggggtagtgtttaagatccatcaacaccaaataacactgagttttgacttgtcacctctacagattcttcaagaagctgatctgaatccaacacctcttggagttagttgggtctcttcttcctaaggcagttgattactactagttctaatctagttaggggcctgactgaaggaggcctaaaaagtgccaggaataaaagcagtcaagcctcataattttatgtgtttttaaacaagacaccctcaagtacataaaacaccacagccattgtaatttaatcatctgcttatgaaaaagacagcactctaaacagaagaactgataaggcaaataatttgcctataaggatttttaaaatgtgtctctgacatcaaatgaactctactgagattccctgtattatgccaaaaacctactggccaacatccaagactgacttgcaagtaccaaccctaatccggatcatgaagcaacattaccatcacctgtacccttcaatagggtgatatccactctaccttaacaatcagagttttatccgctgtacattttttccataagattcctatggacttctccatggaaaacagatccctggaatctttctgtgatttggaggaactcctgtaatttgtatgaggatagtgataacgagagaaacatcaaacacacacaagaaatttacacatcccagcttttctgtgtattccactttggaaaccaatagcctatgaagataaaatggaaacagcacatacatatcttgagtgtgtgtaaatcatcagagtcatatgcaataagtaaacaggaggtgtcatgaggagggaaaacaccacgaatattcccagttcagaacacactttcaagaacgatgcttcaatagtgaagtagaaggggaaatgggcatgagtcaatagaacagcaatttctctatcctttctctccactgttactaagcaatgtcctattggaactgaactttttttctaagtcttcgattgacttcctaattaataagcattgtaatctagtgtttattcctttatgaaggcagagcagttgaaatatcctaacacacatattcaaccaacacccctctccaattattgtgttgttcttcacattgaaatttggcctctactgagaagatattgaatggaaagcccatataagatagaaaaaatagaagcataatggacacacgaaatatgtgatgtcacgatctatgtctacacacagataaagaccatttgacctgataactagcaaatgataagcaaggacgctgtgtctctttatacattatctgatattatttatatattgttatttctatcacaaagaaaaacaaaaaacatatgctcagagaatacaagaatagacagacaatccataggtaagcattaagagtaaaatgtactgaaaggagttactttttccaataatgccttatcaagaaaatctttctttgacaagtaagttatatgtggtcactaataataagcaaaaagctaataaaagaagggaaaaatgagtagcacaagcagttcccagcttaatcaacaaaataatcatgctttaaaaaatgaggtagtacattctcttcctgaaatcattacagtctgttaacttaaaagtaaaattaatggcgattcgatgctatacaacactgtgtagagtaaacccaaaattaccaatatgaggctcaggtacactaaacagtcaaataactatttctgaaagccctgtcttcttattttttctttttttgttctcataataactgactgaatgacacacactagttgctgcatatttagtttatttctaatgaagataactattaggtgtccaatctactcagtccttaatcttttaaagggaaacagagagggaatacaattgtttagcctaacggaaatagcttactactataattttccaaccaaaagtctaactcttcacattgtatacacccataagatagaattcaaaattctcacagcttgcatattacaatactcagagtcttaccaaacacaaaatattatgacttatttgaaaccaccgaactccccccaaaatatttcttctcaaaaccaactctaaatagaatagacaggtatccagttatttcaattaacttaaaaatacaatactaataatttaaactcaagtagattattttcctgatttatgcagttggaatgctttaagactaacatagaaagctaagttctgatttatctttcccatcatactgttttatctcagacacatataaatgcattcataggtacacagtatagtactgttcgcccaggctagagaataaaacagctagcattgtaccaggacgcctgtgcatctttccattaaagccatagcaatattccctcaaacacatattcatcactaccttttaatgattctgggctacacggatgaaaagttttgatttagtgcaggttaaagtagcacatagtctttcatctttattcataatcagctctgatccccttgctgaaaaagaaagaaatgcaaacatcttgaactcttcaatgggcttttctctaattaaagcctttaacaattttggggtgtttcaaagcatgacttcctttttaccattgttagtgttaactaaagaaatattgcccaataagcactccagataatatactcaaaaaatcatctataaaatgcaataaaaatgattggggcagaagaacactgcatccttaattttagtaagattgttgatgataaccagagtgaagctgcctaagcaatcactcaaaagcacatgtaatagttaaacgcatctttattatggttgctcagtgtctaaaagtttgttgccagtagcattgctattaaatgtataaggctgtcaaatctatttgtggccaaaaaaaagcaactctgcaagataaatattatttaatgatttaataggcatacggcactagaatataaatacccataaataccccaagtcataaaagtaacagaaagtaaaaaataatttaggctaagacaaaaaaagactagaattgtttagtcaagaacgaaattagtaaaccacatacatttacacagacacagtctctcttgccacaaaattgcaaagtggtctacttttatttctaaaatgtgatatgcttatatcattattataacctaaatgtttaaagggggtataagaaaaagcttctaaaattattacggatgctactaaatcatgtgtataacaaccaaaatatctggaatgcccaaacgtgctgtcattgctcaggacagaataatctattcaaaaccagcagggaacacgtgaggaggcctcatttacttcagtgtgtttccccacatatgcatcatttgagaatgtcagatcactttcacgtatatagtacataatcactgatgatctgggaaatccacaaggccacaaagttgatacatactctgatctagagggggaaaaaaatcgagaaagccggaagtttcccgttttccaagaaactgaagacattcttacctttctgtacaccagcatgttgggtgattcatcggccaccccgttgctggtctgcccataattattcccctgggccatgtcacccaaaacttggtccactctcaagatacaagaattatcagtgtgccctgcaaagggtcagagagacttcagtgagatcccagtgggactcccctgattcatcatcatcattcacagcacccaccccacatggcgcgttcttacaaactggggctggctggagaaagtgacacaggacatggattttttaaaaagtgagttgacacctacaataacctcaaggaattgtaagaaattacaatcttccaggtagaaatagccatttggttattgttttagctgacttcattttctggatactcattttgagaagtgtttgatgctcaccctaaaaactcgtgggtagcattttcctagtacagagttctcttctctcccaatacttgcatctgaacttggtgatgttttccccaaagggtggaaaggcaacacctgggggatgcggtgggggagtggggggcgggttagcacactttctcctaggtatctgtctagtgtccccacctgcagcccatcagagaggcccattcccggtgtcattctccagcgcacgggcttcctctctattcccccgggtctcccacacagagccggagtatatgcttcgcctactttcacctgcctgcgctgccagccaccggctgctctcctttctccccacttcgcttcggaagtccggaggtaatcctgcctaatttttgcaagaagacaccagaatatgtcccggcaacaagaactagtgggaggtcaagccttcaggccattttacccgggtcaccgtgggtaaaagcctaactgcagaagcctccagagcaaccagccaaagaggagaaaacaggcaagcccctgctccccttgctcgctctcacggcagcagcaaatggcaggcgagcctgtgccccgcgccgcggcggccgccggagccgggcagcagtttcagcaccgtggaccgcggggtgcgcgcggcgcccgtagcccagccccggcgcggggctcccgggggcggccgccctgcgcccgcggacgctcccgctgcgcagagcgagggctgggtgcgggccgggggccgggagggctctgggtggcgctgcctcctccccgcccgccttccctatttacctcctccgccaaggtcacggccccgcggcgtctcccctcccgggcgggctgggtgcaggcggtgtcagctggcggcaagcggagcagcgaggcagggtagcttcatcacactcgcggcggatgcggattccgcgccgccccggctctagctgctcaggcgaccgccaccctcgcctcgccgccgcccgtgcacaggcggctccggcagccgccactcgcgcccgctcccctgggccgcctcgctggctctctccctcctccgcttcttctcccggggactgggaccagccgagcgcgcgcgggagtcgagacgcccggcccgtgcgcgcgactgggaggagggaggaggggacagtcacgtgggacaggggcgtccgaaggtgccggctcggatgggctcggctcggccgccgccacaccgcccgggcctcccgggcctccccggcctcccgccctcgcgcccctcgggaggctgtagtcctgcccccggcgcggccagcccgcgctcccgcacaccccgcccgctcgcccgcgcgtgtgtacgtgcgccggaggcctggagagaccggagtttaacgcccagtgtaagccggaaagggaggaaggctgtgcgatgggtgggtgggtggtaggtgggtgggtggtctagtgaatggatggacagatggacggacggatgcacggatgaatggatggatggagccccgtgcaaaccaaggtttcatcacgtgcctaacgactccgctgaaagtcccagggaagcagatgatttattattattattattattattattattattattattattattattattatgcttaaataacagagtagagagatattgagacaccctaggaatgaaggaaatggccaggaccaaatgaatcattcatccccgtttgcctgcggttttcacagcttcttcctaagttggagaaatgggaaacgatttgaaagctgccaaccggaggtgaaaatcttgccacttgtgaaactgaaggaacatccccaaggcctggcttctccttttaacagaaggtgctcagaggaactttcctcttgcccactgccctcatcctctagcaattttcaaagagcttctgaggtgctgatcctcctagctatagtcttcgtactgctgccacaaattcttctgtaaggattagaatgacataaaggagacagatcacttttgtctcggtggtagtaaagcaacctgtgcctctggctttcagggggaagggctgggccgctgtaaatctagttttccttcctctcctgggccagctgtggaggagagggagggagagaaggagaagataatcaagatcagctgtaaatctagttttccttcctctactgggccaggtgtggaggagagggagggacagaaggagaagataatcaaggtcagcctttcctgaccccttggtctaagcagactagaccttattggagataacacttctactcaaacaggggtccatgtggaccaatgtattaccccagccccatgcaggtcttgtcaggtttctctcaaggaacaaatatttatctaacctagcccctgttccaagtactacaggagaaatatcattgtcccaaactacacacactctagtctgacctgtctcccactccaactccccacatctttccactgtagcctctggaacttagaatcttcttcagcaaaattctcttcgttttcgacttctcgaaatatttctttaacgtttttgctctcgctgaaatctacttatccctcctttaacccctctctcttccctcttgttcagtctgctcctgagaagttgatgtgacttgcatgacttggattaataaatttgcaaatacaactgggtatgctcactcagtttgaccattttcctcttaagagagaaccgcctgaaggaagcagtcttcctcctcctttgcatctctgggtaaagtttccatcctcataggaagctgtacccaagctctatatatagagagcctatatatatatatagctctatttatcatatatataattggctctatttaatttatatatataaattatacacacacataaacatacatatatataatatctcttgacaccctttccacttattgccaccctattttccttcttccctttatgccaaaatctttccattccatgttgaacctgttccactttggcaaatgacctccatggtgctaagctgatggtcaattctcaattgtcatatgaattgacttttcagcataaattaacccggacaccactctctattatttctctttctgcattactggctgctttttctcactctcattgcttgttcctctttgtctttttgacccccaaattctgaagcatcttggatcttagtcattaagcctcttctcctctcaatttacatgcactgtacctaaagtgacccaattcaggctcatacattttagtatttcattattaaacactaataacttccaagtgtatatttttaaccaggatctatcccctgaaatccagtctgtcaaatgctcactttacatctccacttgaatatctaattatgcctgattcagcttgaagatagcaaggatattgtcactgcctcagatcctaggcatagtatagttgctggtgcatagtagatgcacaataaacatacattaatgaaatgaatggatgtatctagtaacagtaatctgataggttcttttgtattttgcaattgtatttttttttgagatgaagtcttgctctgtcacccaggctggagggcagtggtgcagtctctgctcactgcaacctctgcctcccaggttcaagtgattctcctgcctcagcctcctgaatagctgggattacaggcacgtgccaccatgcctggccaatttttgtatttttagtagagatgttggccaggctggtctcgaactcgtgatcccaggtcattcgcccaccttggcctcccaaaatgctgggattacaggcatgagccactgcatccagctatgtattttgtaatggatttttttgcattatcttatttaattcttactaatgaccctatagttataatagttatctcatttacatcaatacaacaatgaggaaggagaggatcagaaaggttgggtcaacttcccaatacaaccaacatagccaagaagtggcagtggtggtttgtactctatcgactgcattagctggaacaatgtttctcaggatcctcttgcccgtatgcatgtaagtgtatgcatgtaagtacggttggcccaaagacgaattcttgcaagatttgggaaacagagtgaaacagtatctattcctctctcaaggtctttgtagtttgctgtgacaacacatgcagacacctggagggttctagcatgtcctggccctcccccacttcacacccagatcttccaaatttccagcacagctgatcaacagtagccacacacccatcacaagggccttaacatggatccaaagaggcagtagccaggcaaagacaaaagcttttcaccgagtattcttccagctttctttcagggtccccctcctggatgtggcaggcctcccagattcccctggaagttctgacttgcccatacacacaaggacctcaggaaacccaatagtgactttcctcagatctgtgaattccttcttctggaaaataaccttctcaacaattgtgtaagttctcataatacatccctgattccattatattcataatggttccactttcatgaaagagtggctggcagagctcaaatccaagacttctgggttcttttcactattctacaagaaatccaacttaggtagataagatcttgagacaaatagctgcatgtaagtgaaaaactgaatgacagtgtatgaactactgaaggagagattgacattcaaaccgggctcttcaaggactagcaggatatctactatatgaagggtgaaggagtttctattcagacacaaagggaagaaatgctgaaacccattaggaaaattactagtaataaaaacatcatgtattgaattcctgctgtctctaaccatattaaaaatagtcttaccatagctgacaaaacttccctataaggtatgtaagacaccaatgtcctagttaggaaacttggccatgatcgcacaccttctaaatatcagagtcttgactcaaatatgcctgtgtctgactgtaaagccctgtgaaaaattatgcacaaatgcctcctagcaacagtatgagtttaaaaaagctagagttctcccatcaaggtgcctctcattctattttctccctcatctgccatccttccacacacctacctctcaccgtgctctctgggcagttatgactcaagattgttcgtgtctaattactgttgccaagcaaacatgaagaaggaaggttcaagaaatagcatatttcacaatttttctactgttatttgttagtcctcattagactactcagaatttgtgttactgtatattggaaacaaaattatgtctatcaccttaacgtttctacgacttgtatttttcaaatataaacttagtgaattagactaggtcgtctccaaaaacccatcataagattcaacatgttctcttttgtgctttctttctagataatggagtcctttatgttgtaaacaagaataaaaaagaaagtatagatattgtggagtagtttttttgtggggggggggtcctttctttaaaaaccgtgtgaatatgtggttctcaatcattatatccaaaacattttactatttttcttgtaagccttgtattttattaatatttttgtcaaacaaattaaatggtaataatacatccattttacatgccaggcagaacttctaaatagcagataaaagacctgttacctcatcaaggtaatgaattccagcccaaacaaagacatttcaagattttttttagcttcagtagcgttaccttgggaaaaatagtcagtttttaagattttgtggaaatacaggaaatagtgtctatttttgcaaatcattatggatataggaaccccaaatctattgatatagacctgctttttccctccttttttcatttaacaaaaacttagtcatggatttattgtgcatgaagccttcttaggtttctacaaagatcataaagaaatataacaggtgatttttgtcctcaaggagcaaccagtctcattcagaagatgagagtccttcctttctctcacagctcacatggagttccatcagtgagtcccaccgggtctacctagaagctgtatccagaatctggtcactgcacaacatctcctctgcttcctccctgctttgaggcaccattgaatctctcttggttgaaggcagtaaccttctaactggtctccgcttgcatcccttcccacctatgtctgttctcaacatagctgccagcgtgatcacggcccttctctacttaaaatcctccaaaacactccatgttgcataaagggcaagatgtctttaaaatgcgaaagaggcacttctggagcactctctgccacatctgacctcaatttgtgcccctttccgtcttatttactctgttccagccacactgccctcctggattctgtaaacattccaagcatgctgccacctccaggcatttgcactggctgatccctctgctttgaatgctcttgctttactccaatggcatcctctcagtgagggctactctatccactttatagaaaaccatgtaccttccctgtactctgcttcctccttacactgatttacttgcctttcagagcatgtgtctccttctaacatactgtacaatttatctatgtttgatgtctgtctcctagaaaaatttgagttccataaggtcatagatttttcttcttctgttcacactgctatatcctcaacgtctagaacaaactctgatatatagtatatatcagaatatatataaattctgatatataggtatccagtaattatgtgctgagttactgggtgattgagtccattagcatgattctgtttgaaaactgggtatactggaagaacccagtcaacaacctcgaactgaactgaattagcgtcaggtttccctgtggatggaaatgatctgctcttccaagctgtttcctatgtgtcataatgagaaagactaattcctcttcctaacacacacccacttcacagaggaatgctttgagacgtaattaaatggtaacgtggagaaagcattttgattttctaagagaagcactttattaatttgaggttttattgtgcgaaagaattataagtgacacaggggcaagtacagagatgagaacaatgttaaagggattatagtgttcacaatactacattggaattgtatgagataattgagttaagattgatataagcagcatggaataaagcaaaatagtttgggaaatcttaccccaaatgacaagttttaaagaaatagcttcttttttgtaatcaactctcaattatttacagcacaatatcctcattaatgaattattcttcgcttttactatccttttgtccagttcgtggccatttttcttctaattagaaattccatactaatgtcagagagttgataaagaaaaaagaagtaaaaattaagatttgtcttcttcatgagtttattcctcgctcattccagttgacatgtttaaattctgatctggagtatttccaaaattacccaattttaaaatgtcatattctttttaattaactggcaaattaattgagcacattttctttctttctttctttctttctttctttctttctttctttctttctttctttctttctttctttcttattttttttttttgagacagagtttcactcttgttgcccaggctggagtgcaatggcatgatcttggctcaacgcaacctctgcctcccaggttcaagcaattctcctgcttcagcctcctgagtagctgggattacaggcatgcgccaccacgctggctacttccgtatttttagtagagatgggggtttctccatgttggtcaggctggcctcgaactcccaacctcaggtgatccgcccaccttggcctcccaaagtgctgggattacaggtgtgagccaccgtgcccggcctaattgagcacatattatgaatgagttgtggtataatgtttgtgaaggaataccgaaaatgttgaaactttgttcctgcccttttgacatgatggaacaccactagagaaggtgtcaaaatgtctgagctttaacctgtctccactgcttaaaatcgaggtagcattgggcgagtaatttgaccacttgaagcctgtttccttagccataaaacaaaatttgtattatctgccttgtcttgctctgctgtgaaaatctttttattccaaggcaaattaaatatttggaaagacggtctggcagtagtcatgttgcccatatcgagagatgcagtggcctagaaattaaccaccaattctgtggagcagatattgggagcagctgtagctacaatgatggaaaacagtccatccagcaagtcgtgtttggtgtccagagtgtagaaacaggccagatgactggatccgaatgacaccatgagagatgagagaagcagtgtccccataggagggcaaggcatagcagaacaggccatacctggggctcttaccaggcagcttatgggagcagagctccagcagctggacgacaggagtcatttcccctgacgtgaaaaaccgcagaggaactaatctcctatttggtttccaaattcctagccaaggaggacagtctaaattgaagatgatagaagacataattagaataataaaatataaaaatgaaggggattaccctcaaattacaatgaagaaattgggctttagtgaagtgaatttacttcctccaggttacacactgagacagaattagagccaggacctaaaaccctagtctttatattgagatatggtgctcttcacattatgtgagaagaggcaactctctcagaggcaactgagaccccaaataagggaagaaattgtaaaagggtgctcgatggtgttcatcaccagaatcagagcagtcccagccattggcactgagagaatttggaaatgaaatcctaagcaatttttaaagcatggtggagaaaaaagatagcaaaatagagtcaatttgcctgaaatgagggagaacatgaatgcacaaactggattggtgcccagaacctatccatgggaaaattctataataaaattcaacaaatgtttactgagctcccgcaccacaccaagcatcatggtagtctttgatgatgaatgaatggacctttcccatggcagaggcaggtaggagagacagatctataaatcactgtagtgcaatgtgttaagttcaggtgcatacaaagtgttaggaaagcacattttccatgaaaaggggacattttggcagggtctttaaaaattgatcagggatcttccagatggactacaaggaggaagagcacagcagcatttcaggtaggtggaataacatgtgccaaatcacagaagcatgaataaaggcaaaggcttgatggactgcaaaattttggcatggctgatttcaaagagaagaagtgacatatggggattggaggatggaaatgaaggtggtctatagcttgtggacagattatgcagaacctacagcctatgctgggaagtttgagcctctttttttttttttttttttgaggctgactctcattctgtcacccaagctggagtgcagtggcgcaatcctggctcactgcaacctccacctcgcaggttctagcaattctcctgcctcagcctccctagtagctgggattacaggcacatgctgccatgcccagctaattttttgtattttagtagagacagagttttgccgtgttgccctggctggtctcaaactcctgagctcaggcgatccacctgctttggcctcccaaagtgataggattacaggcatgagccactgtgcccagccaggaagtatgagctttaaccaatcagtaattggatgagttttaaacccttaaacagaaaagtggtgaacaatgagccactctgaatgttcaccagtcacacctcatctcagactagcctcgtttcctctttaaatatggtctctaaactgtcaaatgagggttatattaaggcaatacatattattcagcaaggcacttgacaggacattttgctttagctttgaaaatatactggtaaaacagggttgagtaacagttcattggactcataacaggctgagtgagactggcaaaaagagcactgatgaactgagcaggacacactagaaaggcaggtccatgaggaggactcgaagcactgccctcagaatgcccctgtcctatctgggcctgggcacagtgaactcacgtggtcaatcagatgtataagtggcacaaagctatgaggaagagctaatggcatggggacccaggaagatctgcgcaggctgaaaagatgagctgaaacaagtaagatgaaatttagcaagaataaatattaagacttatacttcggtgggtgcaatggtctgaatgttgtatccttacagaaagtatatgttgaaatcttaattcccaaagtgatggtattaggagatggggcctttgggaggtaagtaggtcatgagggtggtaacttcatgaatgagattagtgctcttataaaacagaccccagagagctcccttgcaacctttctaccacatgacaacatagcaaaaagatggtcatctatgaaccaggcattgggccctcaccagtcactggatatgctatcagcctgatcttggacttcccagccccgagaattgtgataaataaatatttgttgtctataaaccacccactctatggtattttgttatagcagctggaactaagacaaacagagagggctgggttagcactaaacagcatggagaaaatataactgaacatcagtttgaatgacaaaagatactgggtttttgtttgtggttgagagcaaactctatattgttcaaaaagagcacacatctaccaaaaaaagataatataagcacaaattgcatttctagaaatatagtgatggagaagtaccgacgaaatgaatggaggtgttagaaaatgggcccatcaatgctttgtgcagacatgtctagaacatcctggatggca

SEQ ID NO: 418 - DNA, 61291 bp, Homo sapiens
cagcccaaggtttgaatcccaatgcttcctgcttcttctaagtctccattaatcattctctctcagatgttttatccccacattttctattggaaaggacttcatggcatttctatagagtcttcccttaaatatttaagtctctgtattcctttttataaaattctcaaatgtccttaagctcctcagtacccacccccacccccgaaactaccctgtctctcctcccatctggaaccaagtttcagggaagagttatctataagacccttgtgcttcagtttcctcgccttccattcactcctcaacaccctgccatctggtcttgtcccactattccataacaaagggaccatattttgacccttatattaatagcatttgaccctttgcctccaggataacacattctctagatttcttctcccctccctgaacaggctttctcaagctccttggtaaacttttctttcttggctcatcccttggactttgctgctactttgagctctgtctgcagccttctcttctcatcacatcctccctgggtgagttcacaccctctaaattcttcatttgccatctttgttctgatgtctcccaaatgttgacagctagctcagatctctcttttgagggccaaacttctacacccgtctgctcacttaacatctctaggtagatattctatacacacctcagactccaaatctatacttatcaccttctctcacaaactatctccttttcttacattttctttctcactgaatggcaccctatccattctgctgttcaaaccagacaccttgaagtccataacaattcccttttcttcctcattatctgcatctaatgagtcaccaagtttaatcaactttagctcctaaatatctttggactccatctcagcttctctgctatctggattgatacaacagtcccatgactactttctctggctctggactggtctttctccaatctattctctataattggacaacataatctttctaaaggacaaatatttctcctgctgaaatccttttagggactccctattcctctcaatataaagcctagcatggatccctgatccccatctagttgcatctcttgttaattccttccctgaagtttgtggtccaactgtgctgatccagttatggttccacaaatataccatactctcacctccaaacttttaaacattctgtgccttggtttaaaatgcatctatcacccaaccccttgcctccccacttggctttccaagatcctactcttttttcagctatcaatctagaaatagaaatactttcctgaccaccagactggagataggtctcctatgtcctactacagaatcctcatcatagttcttccttattactctactgtcattgcttgtctatccataggttatccccaatagctgattggctcctggaaatcaaggtccatgtcttattcactttatcccagagcctagaatgtagtaggttctcaatatacttttttgttgttgttgttgttgtttttttttttttgagatagagtttcgctctgtcacccaggttggagtgaagtgatgcgatgtcagctcactgcagcctccacctcctgggttcaagtgattctcatgtctcagcctcctgagtagctgggactacaggcatgtaccatcatgcacaactaatttttgtattttcagtagaggcggggtttcaccatgtgggccaggctggtctggaactcctgacctcaagtgatccatctgccttggcctcccaaagtgcatgagccaccacgcctggcctcaatacacaattatttaaaaataaaagaatatttaaatgcagatctgtttaaaattaaataaatatataaatgaacacatgtgaagactatataaatgagtggagaaatatagatatatagatatccataatactatgatatatatgatctaagttatgattagtaatagcagcaacaataacaataatgtagctaacttctactgagtgcctattatgtgtcagcatcattataaatactttgtacttattaactcaattgatcctcttaatatctttagaaggtagggattaattcaaggtactggggatgtatagaagagggaagatttaattctgctggtattgagggggtgtcaatgtagcttcagagggaaagtggcttctgggtaggtagtagtgaaagccttggttttgggtgagattcgaaccctggggaagaatatctggtggggatactgagcaggagtggtaagagaagtctgagaaaaccaaggggaagtggcactagaaaaaacaggtaaagcgagagcttcagaaaggaagagtgttaaatgtcctagtaatgtctagtagtaaaagaacataggctctggcacctcaagtcctaggtgcccttttgtgagagtaattttagtagacttattcatactaaagcagattagggaaggaatataggcgaagaaatgtagagaatgatacagagttctcatacagaaaactggtagtgaaggaaaggagagaaaaggaaaaggcaggcagggtcaaggggagatttttttttttctttttctagataggagttaactggacatggtttgatttggttttggtttagtcgttgatttttaactgaaaggaagactcccattgactaaatattgaagattaaaggagatcagaagaggcaggacagactaggatgattctgggaaagacagcaggtcttcatctgattggggaaagggacaggtgaattactgacaaggggattcaactggaggaagttctcccttgatggtctctatcatccctgcggaatatggtatcatagttaagatattagaaccctattcaacccagtcttcttgataaaggaagagatgaggaaaaaataagagattttctttaaaaattatggctattgtatatatcacactaaataaacagaagaatagacgggaaagagatgcaaaagagtcagccatacatagttcctttgaatgaatctagggagccaaatggaagcaaaatatcattttgcgaaggcacatctatgctcattaaactagaccataatctccatgaacccaggatatgagactgtcttgtccactattgcatccacaatgcctatttcaatgcccagcccataccaggtactcaataacagttttttagatgaatgaataaaaattcaaacacttataagttttatttagttattttaatcaaggttaaaaacagagccagcttcatgggtatgtgacctgggcagtttcacagggccccatgccccaaagggcccctggcttggtttaatgctttgcagtcactgtgaaattttcaataatatgaacaaggggactcacattttcattttgcactgggccccacatattatgtagccagtacttcttaaaaaaaaaaccacacgtttctataaattttcagtaaatggatattttagatgcatgtgaatgccaaattacccatagaaatttatctttaaaattaaaaaagtatatttcaggcttacctgaaatggtagattgtggtttttctttcttaaaatatggttcatactctctgtagacaattttcttaaaggaagttacagaaagattcaaactggaaataaaatacaaaaactaatttgaaaggcatattcaatatctatttctcacattacaaaaaaagtagatctctcatatcttcagacttctagtagaataccagtatctttattgtatttcagaagtccacagttttataaatatgatcaataagtaaagttaatgaaataattattggtctcttcaaaaatatcctgttgtgataactatttgttcacaagttaatctaccctaatatcattcctcagaatcaattttctaaaaagaacccaatatcacagtagaaacccaaactgtaggtttagattttatatgattaaaatatgaccaaatcctttatgaataaatatatgagctgtttttcaactgatcaatcaaatatagttttaatctactggggaacattgtgaaaaagtattgatttggtggaatttatttctagttgagaggtgagagatggctaatggggtaaaagccctgggattcatattggaaacaaacaaatgaaaaaactgttttggaaagagtcagtaacttgtccaagagatacagttgataagtggcagaaccaagattaaaaaatgtgaaaccactgcattcatgattttaaataaaattagagagaggacagacaacagggagagttgtgagtggtgggttactttcctgtttttgctgttgttgttattgttctgtacctctaaaggcaaatcagtcttatccttgtcttaaactcaaagatgagggtaaaaggaaagagaatttggagaaaataccttgcaaatgtctaaatcagttgatcagagtggctttgttttgcttcctaatgtggggacagtggcccagccataatcaagacataacagcacccacatatgccatgacttctatacagcgcggtggctagggtgcaggctgtgaattcagtatctctggacttgaagcctatatctacctcttattgttttactttgaaaagtttacttcatccatttgtgcctcagtttctacaactatgaaatgagattaatactgaaatctccttcacagaattgttgtataattttaaataagttgatatgtgcaaaaggcatagagctggcacactagaaatactcaatccatgttagctagtaatattattttgtaaatgtaataagagttagtctttacccttcaggttttctcagaaagcaaaaacaaatctgtagttacagtaatgctcacaaattgtaatatgtggaatacagaaactgtgttaatatgtgggggcagaattaaaggaggcacgtaagtacttttagaatagctagatagagaaggtagtggattctccatcactggaagcattcaagtagaaattagacaactacttggtaaggtcattggtgctgagggaaaggggaaaagtagaaggttaaagcgtggaagttgaatatgaattaaatgaactcttagcattcttctaacttaagaattccaggattctatatactaatgtccctaatgtggaagtccatttttatttatttatttttagtacaattgaaaagttattgtcctcccctgccccagatctttaatacagaaatgtagatgatggtgtaaaatctttactaaaaaatatcagtctcttacgtggagtaatttcaacagagagatgtttcctaacatgtttttactatgtatgctgtgtattcatactgaggtatgtctattttgatctgaacaatttctattggaaaataatctatctgattaaaaagttacagatcatatgaattcaaacaatgtgtacgacgagtttttcatttataaggattgtttaaagatgatttgttcataatcacaaaatcatataaagctagaaccctagaaggaaaatgtatgtatatcttttcttcaatatctctttgtatacatgtgagtgactaaacaagttttctaaggaaatttttgaaagtgttcaccttagacttggagcaagaataatagatacattttacctttaaaaggcattgtcctgctaatattatatgaaataagtagatagatgtctgctttgtgctaaaatacactttgccaaaagatggagttggctatgttgatattcacctagtgagtatcatagctctaggggcaggacaagttagaacaagttcttagtttaagcagccagatatatggattagatttttcataagaaaatgctagagagaaatgatatgatttagggttaaacaatatgacagtttgtctgggttgtgtttctatggttttgactcaacaattcctaccagaggaacgaatctccagaactttggaaacttacccacaggatgaggggacagaatgaccagtcatggttccctgtgtactcaccatgtgaatcagacctttgccctatctggttctgcctccggtattttgcttgttattttcaacgctaactacagacaagagaaaaaactcccaagcatgaacccagcatgctacaagaaagccaacaaccaagtctgcattctactcatgagcaggcaagattagtgttagaaggactgttattttccttggggttttagcttacggcagttcccaaagggtgtgggtgtgacctagattatcactttgaagtacgatatttaaaatgattatttttgagaaggagggatctcttcttattataagaccaagatggtatgtaataccctccaaaataacccagttacaatgagagttttaaaaaggttaatattatacactaaaagatctcaaaatattacattattttttggcagattactttggttttgtaattgtaaaagaggaacacatctttcataatgaagtgtgatgtaaggaaaaaaagtgagtcacactagcaggtttaccatttaaaaaataactaactggaaatattgaatagactgtatgatttagttaatttctgagaagtcttatttttaacatttcaattagaaaaaatagtttgcaactcaaggatagtattttatctgaattaaacctcctctcagttacatatgcctttaagtagccaaggtaaaccatatcccaggacatgatgaacagagagaaaaaaaaatgaagagtcacattcaataggataaataagtcaaatatgaagcagaaaaaaggtgaaagtacaaaaacatacaagaactgatgatattttgaaagtcatttataaggcagcaataaaattatatgacaaaaagcacaaggtgttcatttttagttttagaagatgaagctatgtagacaatggaataaataatatgtaactaggagtctcataaaaatactatacaactaaaaatctggaacaggagtttgcaggaagggctaatgagggagcaagtgcctggtgcctttgaattaaccaatatataagccaacacaaacatactaacaaaactgtattgaaaataaacttgaaaagaaggtagcatctaaccaatcaaatagggtgctttctaaaccctcagaatgataaactacattgttggatgcaaaattagcatttgcccagtttatttaattcagtatactctcctattagttatatttacttacctgaagttaaaaaaaaaaaaagccatgacattgcaaagggaatgttctctaaaagaaatagattttcctctctagagaagcccacccggactccacacctgagttaccttgagtttgtgggctcaggtcggtagctccaactgatgccctgagcagccacgtagaactgccttagctgtgccgcttctgtcccttggctcccccagcctacccagctggtgcccaagaccaccaggacccagaggcgtgggcagcctgggaacatgcttcctttcctgctcccgctggctgccaccaccccaggacctgggcagcgcttgccgagctgctaaccacactccgggctgtcccagctgcaatgagctctagaggctgtgggtggcagcgtcctcctcccctgcagttcttgcaaacggcagcagcagcctctggctctcactccctccgctttttctggggcttttcctggcaggggtttggtgagatcacagctcccagtgaccagaggtattagggagagcaaccaaactagtgactgttttactgcaggtgaagaaggggcagagatcagaggctctagcaggcgggacaatgcccagggattcatgagccggacaaagctgtatccctccatttccacctgccaacaccacggaagcagtcgtccgttaccactgacctgaggcctgcctgggtccaagctcacacttggagaaccttctgtgcagtgcagtggcacccaaccaccttaagcagatggctccccttttaatctgaggaaaagagtattgtgccctgttactgggcactgaaacactattttcaagtggtgaagaagcagggaacaaacacatggacaaggcctactgctctgaatcgccttcctggcctctatcaaggcacagttctgccttgataagggcctgtcgccagctaagctgcagcatagcagcgggcttgaagagcttggctgaaaaaaatcagttgtccagatttcagtttcacttactagctgtgttgtcttgggcaagttactgtacctctctgttcagttttgacatctgtgaaataaggatgacaataataatttttcctgatagggtatgttgggaggataaaatgctactgtaaactatagttccagcacttaacacacagaggctaggcgcagtggctcacgcctgtaatcccagtactttgggaggccaaggcgggtgaatcacctgaggtcaggagttcaagaccagcctggccaacatggtgaaacccttctctactaaaaatataaaaaattagccgggcgttgtggtggacacctgtaatcccacctactcgagagattgaggcaagagaattgcttgaacctggaaggtggagtttgcagtgagctgatatcatgccattttactccagcctgggcaacgagagcaaaactccatcaaaaaaaaaaaagaaagaaagaaaaagaaagaaagagaaaaagagagaaagaaggaatcacaaatttattattatgatcatattttcctgtctccaggaccccttgtattcttgtttttcttgaaggatctgactgtttcacagcaccttaaatcttactttgctattgatagagaatctgcgaattatattgtctgaggcatcataatgacttgtcctgggttccctgtatctgcatggctccaggtttctgtcttatgctttatgcattcagtacattcaataaattgtaatctggcacctcacatgaggtctctgttaatgatatcaggctcatcaacagcctcttcctccctccccactccccccaatattctgtcttttctcctgtgctgatattattgcaccaacttagaatgcccattttcttcctctttgctgggccattctttacagtccagagttctgcctatctcccagattctgggctcaaattggcttttccattttatgaactattacaacactattcaaattatataatcatgttaattaccttttgttattccatgcaggtatctattgtctccctaactgaacagttgcttacacttctttatctacaatattatcagtgtctcccaaagttggcagaccatcagaattcccaggggaacttttacaaaatgtagattctgactcaggaaacagggttgagaccaaagtcctagaacacctagcctactgattgacatttaaataagcagtcagagatgctactggcagtgtatcagagaaacgttttgaaagcactgtgtccctaaatcccaaggttactaccagaattgttgcaacattattgtaacctttgagtaggctgcttttttatttgcatgtttgcttatgtatatacagtgtacatgacatatttatttaattacattttacagagacaagatgactactataatttttggctctctattttttttaacatcagttccagataaatactatataactttcaatgacctatttattaaacatgggatttaaagaacatgtaaaacacatttgttcttccctgtaaaatattaaggtgatgaagaatttttccatttctctgattttctcttgcagtgtagggtgtgcgatacatatttgctgactgaatgaatggttgaggtgtaaataggacaaccataattgtgtgttattacactgatggtaaacaatgtgatgtatacagaccttactgaacaaaccataaaatagaggaacacggcatttggggaaaattcttttaattacgcatttgaatattggtctttgggtcatttgagggacagtgactggtggcaggaaggtccacggtgacatgtggccttctagcttgattcttggccttctgcagcctctggtgccatccagaggactctctggaagcctcagagcagaggtccaagaggcctcatcaacagcaaccactggagactccagaagatgctacaggaatttcttccaattagagatgccacctgctttccaacaaagtggagaaaaccttccttcaatcaaaaaataaagaggtatttttatttctccacagtctggtcttcttgtgagtcagatgctccagtctctttggttcactggtatttcaagtaacaggtgagtcaaagcacagagactactgcagaaacatttgctcctggcttctgtggcttgtgttacaggaagagaagaggtgggacaggaaggggtggtaggttgagaatttgagattgtaccacaatcccaaactcaggaaacagggttggtccagagcgggtccaacaggctggtccagagctaatctaaggtaattccatgtctttgattcatgggtgtttatggaaacctgcagcaaatgcattatagttaagtccagtgtagcaggaaacttgatgttcacaacaggatcatatggaggctgaatgaggagaccaggaaaaggacaggtctctggaaatgagaccaaagaaatttaaataattatcatttccttaaaaaaataaaagaaagaaaaaaattgctcatcatatctacaccctgaggcgcagcataatcttttctttctagatttcgaatattctgccattcaggctttttgtaggacactcaactacccactttttgggagagggatagcatcagattatttttgtttttccagcaggtagcatagggaattgactccataacagttcgtaaacatttttcagcagtcctgacttctgctttgcaggcaaggccacatcatcaccacctagcagttaataatggaaatgttacacatcctgaaataagttatgtcttgttaggacatttctgtcctggaggaaatgaaaatccttttgtgaactcttttgtaactccattgtcatacctgtgtcctactgccaacacaatttccttcatgcctgaaaatttaatacatacttaaaatttaatatatgattatgtaaagaaaagttaagctttatagtcttccatttttccctagtgttctatttccttcaaaaatatctttatagggatcttaccttaaggactcgggtcaaatgcagcgtttgtaaaaactccatatgttcctaggtggctaaagaacagaaacacaaggatggcaacaatatactgcttagttctcgacaacacagtccaacacatagtatttccagaaaccacaaattaccatccacccttggaattctgctttagaaaggaaagaaaaataaatgccaaagaaatattcgatatcccacttaccagctctgggtaatttgcattgcattttgcacccacactaagttattgttcatgctttatgtactgaatacctgttataccctctaagttgctgcaacctcttctaggtgacaagaggtagttacaaaattcttggcattaacacttgataatctaacgatagttttcaaagggtgcaatatgacccctaggggtgttttttgatttttataaccaagagttcttccgatattgagtgggtatggggcaagggtgctggatgtctacgacaatagagttcatataaggatttccatgtcctccaggacggaaatgtctttaaaagatatccagcacccctgcctcctgcccactcaatgtcagtagaactcttgttcattacaaaaataaaaaaatacccttgggggcatactgtccctttttgaaaactattgctagattataaatagcaaggggtacaggacacaaaagaattgtccaacatcccacataactttggaatatctgctcgatattcatacaggttaaaaatctctgagcctggaactcaagcactttacatgtaaatattaagcatttttttgcatctttaaaatgcaattgccatatgaatcaaaggacaattatcacaggttttcagactctttaccggagttgttcaccatgttgaaaaattaggctggtgttggccacagttctaatgctctttgagtcactaatacaacattcccccatcagtccacctgcgtgggcgttgctttcctagtgattctgtggaaggtgcacgcttctgatgacctcattgcatctactggcacagcgcctaagtttttgcatcttgtttttattataaattacttttcattttattcctactttatattttaattagaatatttgttatctgtgtattttacttcagagtagaaaagaagacattgcaaaagacattgtaaaaaggaggcaggcattgcatgtaatcattctgacatattacagtgaattataaagttaaggtagcaaaatttactcaatcataaaacatttctaccttacctgtgaggattcaaggggcatttcccatcatctaaaatcagcaagaagacaagaatgaatgattaaaaaaaaaaaacaagatgaaagagagggtcattaaggatagaaattactggggaaaaccagtagactgattttcaggagggctcattataaggggaatattgggaacagtttctccctgaaaggtagaaagtgttttaggctaaattaaacattcgacaatatttaactccagagtcctgtcactttcttcctccttcctttcagtaaatacataaatcaatttcttttgagggcatcttgtgtcacttgccctcagcccttagctgagcaagctaatcacatacatgaatccaaaccaacagaacagtggatgtttttcctccctggtagcatatttttatccaaataacagactctcatagttgaattttcagctatggctgcagcattttcctcttatttggccatagaaaacttcaaagcctaaaatcaaattgggagaagctgaggaaaaaagctcccatccccaacaaatgaatgtatttattattaaaaatattggggcatgagtggccatttgtccttctccactgttagagggtcctctggaaatgtctcaaagtcaaagaaaggacttgggggaaacatcaagattagagtgattcctacatgatcatagagattaaggtctaggagctcttgcctctgccttctgggtttggttgagcaagcacacattttgcatggagggattcactgtagctctcagtacatctctttggtattgaagcagagtattgacctttgtctattgtcttagccactcacaggagagtatatgaaggaaatttggaaaaacagcctcaatgttttggtagcattgtaaatggagaaagaataagagtaaggaacacgtggttttgcctctgagcagttaagaataggtgttgagacctatgtcaacaatagagaaattcaatgagatctctttcagatattttaacatagccactttccattaccttgatttgagcaattaatggtctctctgatgcccccagttactttctatgaggagtgatgaagaagagccccattaggttataaacaaaactttatgaacttataggcaggctaagtgtctggagaagattgagaaaggatgttttaaaccttaagagatgggatgttcccatctttaattcctagactaaagttctttttctgatgaacagtctgatgaacacagtttcccttacagagagttttcatctatttggtcttctctgtttaaatcctgcatcaactttacaaattttcaggagaaaaagcaaatctcttagcttatcacaccaggtcaccaatacaggggcagcttcttctgcccctaacttcatctcctgcctcctccataatccccttttgattcagatgcactgaactgcgaaacataccatcttctcattgattttacactttcatgtctttctacatgccattttctctgatggaactctatttccattttccccttggctaaatgcctctcattcttcaaagctaagcttgaaaaaggctttctgacctgccagtctggtttaggcatccctagtctatgttctaataatacctaggttgtatttgtgtcctaacacacttactacacttcactaccggcactgatttcacctgtctcccctactggatttttccttccttaatatcagaaaccatcattatgagtctcacactctaacagagttgatgaataaatgactgctacatgaagaaatgagtgaagtcaggaagcataacacctttctaattagctttagtgatagcctagggtacttagaccagaggccccaaatgcaaaactgcaaagtagcctcatttgaattttgggagagagcttttgaaaaattcagatttccacacccactaccaagtctccccatagaaggatctatatttttaggaagttccctaggtgattctaatggacaatcagttctcaagatcacttatcttggctttattttcttttaatgcaaatgttttccaacatgaactactgaagttgtggtttttgcctccccaccctaaattacataaatcaatttcttttgatttatgtaaccaagatgcaaagagaagactctttcctatttacctttttgtctgaaacgctttcttagcaaagccaggagcgtcccacccattatcagacctatcgtagaagccaccgctccaccaaagtaagtcagggcttcctggatagtcaatggtcctgctacaaaacaaacacacacacatgcaagacataagaagtgtattatgcaaaagactagtctttctctcccagaaagttttcaagaactctaagatgtgcgatcaagtaggatcaccaaaggtcctgggaatgctgacaagctaacatgaaagaagatctggaattcataaatccactgcaacagaatgggaagtggggccttattttattcctaaggcttaaatatagactgtaatttccaaaggaatcagggtgaggacccaataaaagaaattaaattgtagacacaagaagcctatacatgtaagtatgggcaaataaaataaaagtggggccttaatttattcctaagacttaaatataaactgtaatttccaaaagaattagggtaaggtcccaataaaagaaattaaattgtagacataagaagcctatacatgtaagtttaggcaaataaaataaactgtgcataattttttggcaaagattcagttatgtaacaaaaggcagtcaggacaagctatgaggggaaaaaatagggggctgaaatataccttgcaaacagatggaatttaattaaggaagatctgctaggaggtttttagagttaggtggtaagcaaaggtcttctgagataataaattagaaatctgcatgaaataactcccagtttaaaacattttgaaacttcaaggtctgttaaacagagattataacgaagcaaaaggtttcatttcacaaactgaacactgaagaggaggggtgattacctacacagtcactgggtttaatttccactactttataaggcaaggagattctgcctgattcattgtgaaacacttattaagcagggggaaacccggggatggaaagcaagaccactatgagaaagacacagggaagaaacactgattttgttattttccacatcaaagtgacttcttaacccacatgaaaattgtaccttggcaggttggcacggtagttgaccagtggccattctcttggcatgctgtttgtgcagagccattaagtaactggccctctagacaatggaaagagcagattgatccataactgaagtttccccagaggttggagcagttcatcgctattggcttattaacatgtagttctgagcatttcacagctgcagaaaagaaataatgcaagagaaacaacatgtggattggaggtgaaagagattatagtttcttttgtaacctaacattgccaataaatgaggcagaatgtaaaaggtcagaaaggatatgagccacttccaatattcacagtagctcttctaacagcacatatatgaaaatattctctcgaagggtgatatccaaagaaccaagatgcaaagatggacacatagtagcatccgacaaatacctgctaatgcattgataaatcttgcctccaaatatactatttacaaaattttggttcttaaaatactgttagtctaaatgttattactacatttgtgatcaactggcatgtcagtatgtgtttattgaaatacttaataagtgttcagcatatctggacactggaagtttgaaagaagtagactgtcatcctccttaaactacattttcagggaacttcagggttattctttctaatttatggataggaaattaaaggtcaagaaattagatttaattcaaataaatgttatttatcagtagtgacatttgcaaagcactgtgctatgttttgtgggggatacaaaaatgaaagaaacataggtctcaatgctttatgtgtagggcgatagctcttcaggaaatatcatgtatggcttaactttttatttaggttcaaattattatgaaaatatggaatgtttatactgtcacataatatgcaacttctagtttaccaatttctatagcaggttttacatttaatatgtctatttttctaacacatcttggacatctgcaaatgtttcttcctttaagtctctgagtacttgtgtattagctttagcttgtgacatgaggaaggacagaagtgaaatgcctgtgacacattacttctaatgggattggtgtggatttcataagggagatgacacttggagtagtggttgtggttgggtgagacttcaacatacaggcacaatggctagcttgagtacttgcaggaaggcaggttcagaactgcctgctccttttcaccttacctctgcatgctggagttactgctgtccattgtcctgaaggtctgcagctgagagtgctgtctcctatgagtgtgaatccagcgttgcagccaaagtaacaagtggtattaaaaccaaaggttcccggatgatgcctacagtacatggttccctgcccaggagtggtgagggctggacattgcacccctggagtaggaagtgatgctatgcctgttgtgagaaaatgtttccattcagagacctcccaattaaaagaagcgttaacagagttaaggctaatctggaataactgcttttcactcccttcataacaagggaggctcctgcaagagctatttaaggaagttaagaaaaactatcagtgtcagagatagaaaaccagatgaggaaaattattaaaaatcatccttgaggagatgattctcctggccaagagaagaaatcagaggagtcattgttgttgctattttaaaaagaagcaagaaatggtacagaaatataagaaattcagcagaaagccaaatatacatgggccaactgcctgcccaaccctgccttattgggaaatggtactgttctctgactaaaggtcaatgtgaaagttgaaatttactgcaatgattgctttctgtctcaaactatttcttccatttgaatgatcccaccagctttgtcattaacttgccatgtggcaggaagatgatgattgacctctctgcacctcaattcctagatttgaaaaactggaccagtgactctaccccagtattgtctgtttctctcagcaataaattaatggagaccattccgttcactcaacaaagctctttcaaaaaaagaagccatgaaacaaaattcctgcttaagaatcaatataccttttattcacaaacataaaaatatcctgtcactccttagacattttaaaatccttcagctgtttgctaaacccaaataatggtaatatatacaattatctagttcacatataagaactagataattgtttgttgttgtagaataaatttccaaaagtagaactgtcttagcaagtacatattattacctttgcaggttggtggagtagctgaccatcttccagaagttgtgcattccacattattgggcccctccagcttaaagccgttgtcacaagagaaatggcaggtggagccaacattgaattctccacgagtgtcagaacaatccaggctgccctgctctggggcaaagagttctgggcacttgatggctagagtatcaaattaagagtgtcacaatctccaagtttattcagaagttctgtgttacacaaagttcattcacttatatattcaaaaaatatttattaagcacctatattccaggtattttgctaggcagcagcattccacaacatatcatgtaggtcatttgctgcaaagggcagtgggaggatggtaagcttacagagaagagtataggtacaagtcacgaagacaaagaagtcaaagatttaggcagccatactcaagaacttacaatgtcaccctattttctctacaccctctgcttcagagacctcgtagcctgccgcagctccctctatcttacttgaatgggtgcaatccaggatttcatttccgcccttcctcttgcctgagactacttgctcccatatatcatgccatcttctcaaattcaacacacctaaaactgcaatgattgctttctgcctcaaactatttcttccatttgaatctcctcactaattgttttgtttattttgctgttgtattttaataccacccatccagataacacaggaaaactcaaaacctcctggtcaagatagattagtttcttggaattccctgaagtgactttgtgtgttattgcttctggttcttggctcacattcccctgagaatttttccacttttatggcgtaaaatcccactaatcctccaggatttaactcgtaaagtctctgaagactctgctgatcaccacagcctgaactcttctcctctgaattcttcaactttttgtctgaactgatgtgctgtcatgtcccatgtcataccctcactcttctactggatgggaaagtgtctaaaacccaagaatgattcatccttgagtcttccataactcccatcccaggatctcaagaggcagtgctcagtaaccacttgccaagtgaatgaataaatgaatttaaattttaattcacaatttccccccaaaagtatttttacaaattattgcagttacatattttcttagcattattcttttctccccattaattctctaatataagactattatttatcaataaatgttgggttatagacaaatgaagtgactattctttctttaaatctaaggctattctgacaacaataccttggtcagataagtctcatttacttagatagtttgatttttacaaacctcttcaagacctatatgctccctcatggaaaaccaatgtacagtatttggcttttacatactggcccatgtatttttcagtaacaagctattcattgaaggattatggattcttattgcatgaatccattcaaatagccaaaataacacagtgaatttcagttcagtactctcaaattgttgagtaattaacaacttcatatctgacacatcaaatcaatttactaaacctttttgaaacatgtctactggtgtaactcctagacatgaagtcatctgtgaacattttcacaaaaataactttttcataatctcccagaattacaactttaaactgaagaatatgtataatgtcagctgcaggaaagcagggaccttgtcagttctttgaacactgtatcccagagaacagggcctgacacataggaggggttctacaaatacttatgaattgaatgaatacagtaatgaatacaatttaatttaaatgcattctaaaaggtatgcctacctggtttgaaaagaaacaagaggaattactgtttttaaaaattaaccgaagggggccctagtataaaatgagaactactacagcattaaattcatttgggggatagtgctttggtttcagtcttatcagtcatgctcagccaaggttacatatccagactttcatatttataaaagtctctgaactctctcaggtaaaaattaaccttgacccttacatactaagaatttggctctggatcatgtaaagaagtgggtttacctgtttgaggggcagcctagatgagttacatggaagcctaacccagatccggcatatggtgggcactcagcaaacatgggatgaatgacatttgtggagttatcaaggatgctgctggaatggagattagtgcagatgcaggaaaagagttatacccaggaatgacttttgtgcataactttgagaagtggtcatattcttgagcctactctaaaactttggcaaaaaaaaaaaaactcctgaataattacaaaaatagaaaacagataaggtttgcatttattgcacgcttagtgttctattttcactgactaccaaggcagttctatcacatatgggtattcattggtgttcttctatagtccatcaagaaagtatacatgattgcatctgaattcttaaacatattgatttatattatttcaaatagatttagtaaattatctgtttcctttcattatatcattttacttgagtttgatagagttttctcaataattttctggaaagaagatatagtatgaataataaatgtatctgagttgaatattgtaaactcaaactttaggaataaaactaggaagccccacagattcagagaaatgttgggggaatgaagaaaaaaatggagatgtcagctgggccagagttttagggggcaccagttcaccatattttaggacgtgagtaagcaggcacatggcagaagagcagagttgaggttgggacttggaaccaggacccctccccacgcagtgaaaatagacattaggagttgggttcagcagccaaacatggtcaccagaggatcaatgacagacagtgttaagggattaggaattcagcagtctgtatcatgaaagtggtccaacaggcagggacaggagggatacggaaactgtgtacaagcactccatcatgcaggtggcatcatcaaagttggcacaagaacctcaagcactgcttaggctcatgaaaaggacttcaggtcctgaagggcaaaggcagagacaaggctgaaaaataaccgactctctgtatccaagggttctgcatctacggattcaactcgttgtggatcaaaaacattcagaaaaaaaataaattatataaagttccaaaaagcaaaacttgaatttgccatgtgctgagtatgttgaatccatgcagatgaagtgatgtgtaggctttgcattaggtattatacgtaatctaaagacggtttaaaagtctaaaggagaatgtatgtaggttatatgcaaatattatgccattttatataagtgacttgggcatctggggattctggtatctgcagggagtcctggaaccaattccccctgcagatactgaggaacaactaggcagaggccacatcccagagggcccagggaaccggcattctaactaaagtggaactatcggtagagccatcccccaaaatgaaatctcacattgcactctgaagagacagcttgagaactccacctgccacactgcctctgcttacttggaggcccctgagtccatctgatgtatcctagaactctgcaaaacaccatgtgaaaattggggttctagggggcagtgctgagggttaaaaattaatgggttcaggcatatgggaaaataagaggaaccatttgcctaaatttagagcataaatttggagaacgaagaagaaacacaaatgcaaaaaccagggctcaagatcaggatcagtcaaggttgataattccaagggccatagtgggttaaagctgctgttcatggtcagggttgggtcttgacagtgagtggggatggggcctgcaaagtgggaggcaaatgcctcctcctgcagagaaaggggggctggaaagtagtgaagggaagcaagggctttagagattacagatttagcagccatgttggttgcctacatgatttaaaatgtgaatgagatttttaaaggtttttttaaatattctttagccttaaaatgtgggaaaatagaacttatgagaaatgtcaatggaataaatgaataagagagtgaggaataaatgaatgagtgaaaaaccacaagcccaaatgctttcctccatacatgttctagaattctcagggaacttgtagtatatctttttgacagcagatggtagcattttatgtctttcaccctacagaattcttgaccagggaagcgacctcaaagatggtctggtccactcttctccttttggaattgagaaaacgggagcctaagggtgtgacaagactttcctaatggcacatgacttggagagagagcaatacaagtctttggatattaatctagtgctcattccacaggaaggaataaataatattttagctgtttttgtgtaacacgaatagatttctaccaacatattctctcatctgatcaccaggcactgccatttctaaagttcatttagcagttatagctgcaatctgtggagtggaaaagagtaaattcacaagtgacttacctgagattcagaagctctgccactgggtgatagtgtagttcagtggtcaaaacactagccctataatcagactaggcctgggtttgcatcctgtctccatacttcaagctatatgaactttgctagctacttaacctctcaaagcctcagtttcttcacctttaaaatgggcatagtaataaccaacttaagggtcatttgtgtggattgaatgtgatgatgcttatgaaataggtagtcctacattaagcaataattattaccattatcactggtctcattattactaactctacactgaacaatacattagaacaatagcaccttttgcaactaaacaggagctatgaattaattaattcagtgcacttctattttagaacataaaatatactagatactttgccagccagatgtctcaggggaattaaagacagataagatctggcccctgcctttgagaattccactaaattaccaaagcttgtgtttgagtaaattttactggtaaatgatcaccttcaattcaacagatatttgtcacacacacccatttttattctgtctagctgctgcagggggtataaagatgaagaaggcacagctcctgccttcaagaagcttatattcaatatagaagtggagagaggagggaagtgcacacatagttatgctagggttaaatctcacccatccctaaataaggtctgtggctgggatttagtaatgctcagttgaaggtgaatgtaggaatgaagaaatgaagaatgtagctgaagaagactctgtaaggaagtaaaactttcagtgacatagagctgagccttttcacttactaacagtgtgaccctggacgagttatttaacctctttaagcttgtgtctcttccttatctataaaatgagatgatactgcctttccttattattttagaattgtggtaaacaggaatgctataatgacatgaaagcacttcctgaaactgtgcaatttttttttgagacagagtctcactctgtcaccaggctggagtgcaatggcacaatctcagctcactgcaacctccacctcctgggttcaagcgattctcctgcctcagcctcccgagtagctgggactacaggcatgcaccaccatgcccagctattttttgtatttttagtagaaacggggtttcaccatgttggccaggatgttcttgaaactgtggaatatttaactaaagctattaaaatattatttaaagagagggagaacttttttatctagattaccattgttgtggagagtgttgtttgcttcagctcaagaacacttttatataaatccctgatgattctccattctctgatgtcatctttaaagccataagaaaggacagacccacagcctaccttcacacattggtggggagtctgtccagcgtcccgatcgagtacaatccaatctttctggtccagacaaagaatatccctcgtcacagatgaattgacatgtggatttataactggaacttccaagaggttgaacacaggtcattgttccattctgagggcttagcaaaggtgtgcagggaatggctatcatgggcatggcagaggagaaaagaagagatcattttataattcagcaacctgaactctgtaactctctctctctttctccctctctctctctgtgtgtgtgtgtgtgtgtgtgtgtgtgtgtgtgtgtgtgtgattaatatacaacgatggtatttggctaaaagtgattgtttgaatttcatgatgcttcatcaccagttagagattgtagaggtgtaaaatagcagcagcttacagttgattgacatcctgaagtgctcaatcacaaacagctttagaggtgatttttaaaggaagctggtgctctgtttgggaggatagtggtgcaactcatttttgttgcttctagacaggggtggaactggtttctcccttgataccttcttcagaaacaccccaatgaccttaccagaaaacaatgacaaatgattggaaacacagaaatggaggaaaatactttcttccccctttcccaaccaagtggtggaatctgcgcccaaattttggctctgttacttgctagcaatctatcactagacaataacctttctgagcctcagttgctttatcttcgaaatgggaaaaaggaaaatccttgcatatgtgccacattttcttaatccagtccatcattgttggacatttgggttggttccaagtctttgctattttgaatagtgccgcaataaacatacctgtgcatgtgtcttggtagcaacatgatttataatcctttgggtatatacccagtcatgggatggctaggtcaaatggcatttctagttccagatccctgaggaattgccacactgacttccaccatggttgaactagtttacagtcccaccaacagtgtaaaagtgttcctatttctccacatcctctccagcacctgttgtttcctgactttttaatgatcgccattctaactggtgtgagatggtatctcattgtggttttgatttgcatttctctgatggccagtgatgatgagcattttttcatgtgtcttttggctgcataaatgtcttcttttgagaagtgtctgttcatatcctttgcccactttttgatggggttgtttgtttttttcttgtaaatttgtttgagttcattgtagattctggatattagccctttgtcagatgagtagattgcaaaaatgttctcccattctgtaggttgcctgttcactctgatggtagtttcttttgctgtgcagaagctctttagtttaattagatcccatttgtcaattttggcttttattgccattgcttttggtgttttagacatgaagtccttgctcctagggtcatttttcagccactgacttaaacagcatgaggtttcaagaacactttctacgcctttctcttcccttcattccttcccctctctagctacattcctttcaatctgatcaacttgtccaaagatctggttcttttcttctagttgaaaagtatttctgtagtaagtgtgtatgtggggctggagaggacacaactcaagaagcctataaactgcaaggacttatgggggaaagggtgtgggtgaggatgttggtaccacagaacccatttccagctcttctgtggctttgccttctgacagcaggggtagatgtggaggggtgggaggacattaaaaagggaaattgtctgataacactctctcagaagtattacaacagcgagtggattgcacactgcatggtaccttcctgcccagcccacatttgggtatttcacttgatgtgcacccagcaacaagaggagaaagttcagagtaaataaagaactaaaagcagaagggaactggaaggtcacaggaagccgtggtgagtggcaacctccttgctgtgaaacacccagaggcaggacagtatggagcaatgaactgtaatctgtgccctgcaccacccaggcttgcctgtaagagtttcaatcactgtgatcactgtcctcagggattcccagttcttcccacaacttccccaaagttgtgtggactttgtgatatgtccagacttcaacgtagccaggatgagcacttaaggggcaaggtcacagccccgccctgttctctccagacccagctctgaaggtgcacccaaccctaagtccaggggcttgccatcctctctggtgcctggcgatgaaggacattcaattctgctgtttgcttgtccatttgttcattcattcattcattcattcattcattcatttactgttgacctagcttaacaatggggtgtgtgtgtggggggtgtgtgtgtgtgtatgtgattatgcttttgtgtgacctgaatagtgagtggtttccttttagtaaaaaatatgtatctgcccactttcactcaaatgttgaaagtctatacaaagtgaaaggtatggcaaataatgtagaactgtctagtcttttacccattcaactttattgttaaaattgtatatacatcataaaaatattaattgcataggaggaaaagcggagaaaatattggaagaattcataccagaagcctaacagtgtctattttaggataggagtatttaagaggatatttcttcatttctttattatatttctgcagatttttataaatgaaaatcttgcgtttaaaaagcagcattgtctataaaagttaactaaggaattggatacattgagggggaaaaagcttggggaatataaaaaatatacgtctatccttcaattcacaaacatggatgactagaacccgttcaagttcatacaagatgttgcaatactgacagagcacactggcttgttaaatatcaagtacaaggccgggagcagtggctcacacctgtaataccagcactgtgggaggccgagtcaggcagatcacctgaggtcaggagtttgagaccagcctagctaagatggtgaaacctcatctctaccaaaaatacaaaaattagctgggtgcagtggtgggcacctgtagtcccagctactcgggaagctgagacaggagaattgcttgaacccgggaggcggaggttgcagtgggccgagattgtgccattacactccagcctgggcgacagagtgagactccgtctcaaaaaatgtatgtatatcaagtacaatgcagatagaatgtttatactgaatccacacatttctttcttctgagaatcccgtaacctccagtatacagattagtttttctcttttttctatcactcttcaccttattctaagtctatttctccaattttatacagatcttggagtgtttgcaactgggtacttgtaaattctgcccctcccattttaccattataccctgtggttcctagaagtgccagaccagccttgggacaaccactctgaagcaatttttttcccacctggtcttctttccagatgccatgtttggccaggtgagaagagtttacctggtttgtggcaggagccttcaggtctgggtaaagaccctgataaggagttagcaagggccatgccctactgtctatggccagacatcctgacacttgtgtaatctgcctatcccccggaggcatttgcatttgggatccttgggttataggacaagaggatgagtgagagtatttatgaattttccagtccatttcaaggtggatcttacatagttgtcacctctaaaatccagcctttaaaaatactgcctacaatttatttccatgatgttagaaagaatacactcttaccttggcattctggaggaacagaattccagtttccagtagccaagcactgtagcacacttgctcccaccaggagcaagccttcattgcaggtgaagctgcagactgactggtacctaaaggcaccgaaggggtgggagcagttcacccgggcctcatttggaactgggagatcctggcactgcaaagctaagggatgaggaagtaaggaataaagaaacagtaatacacatgtactcattgatttttgaccattaactctttctagtgtcaagaacagggattcctgaattgggcttgtttaacatagaagataagaaaaagtgtcatttaattataacggcacatgaaggattttattaggaaatgctaaacctttgttgagcatcttggcaacatgtgtcaataatttttaagttatcatgcttttggacccaagaatttatgctaagtatgtaatcaagatgcataccaaaaaatctatttagagatttttgtgaagacattatttgtaagagcggaatattgaaaacaaacacaaatgccattaattgagggtggaaattaatgatggtggatccatgaaaagaatgttaaaggtcactaaaaataatatattttaacttgtaaagataggagagaggtctcaatgtatgatgttaaataaaaaatcagagtaaaaattataatatacaccatgatctcaaagatgtaaaataaataaccatatacgaagagagcacacatattccatgtgttgtctcttctcatctttaaaatggtagtaataattgtaactacctcatagagttagactgagatcatagaaagtgctcaatgaacattagctgctatattagtagcagtggtagtaatagatagtaataatatcattaaggctttgcgtcacatgcagacactgagttcaggagtgggaaacattcagaaggcctatgaagggggttagtgagaccacatctctggatacttaagagaatatccaactatcttttcttgattagacatttaccttcctggagacaacaatggcttgaataatcccttatgatccgttttaagtgtgtcaaagagctcattgtgtctttttctcccagataacatatacaatacattccataactcagactaagtgtcagcatcatggtgtatagccatctattctattgccttcttgttttttctttttttttttttttgctgttcaattttttattatagtgagatatacgtagcatgaaatttaatttaccatttaccatgtcaccaatatcaagtgtacagttcagtggtattaagcacattcatattattgtgccaccatcaccattattcatctccaaaactcttttcatcatctcaaactgaaactccgtatccattaaaccataactccctatttccctcttccgccgagcccttggcaacctccgttctactttctgtctctatgactttgactactctaagttcctcatatgagtggaatcatacagtatttgtcctttcatagtggcttatttcacttagcataatgtcttcaaggttcattcatgtttgtagcagaggtcagaatttacttcctctttaaggttgaataatattccactgtaagtatgtggaatactttttacttatcctttcatccattgatgggtgtttgggttgcttccacattttaactgttgtgattaatagtgctatgaacatgggtgcacaaatatctcttcaagacctgctttcaaaccactgcctcattttaaaatcaaggtatacttaggaacccagaggagtcacatagattgctcagaggtctccgtaaatgaaaacacaaaatgtcaatattacacttctggaacatgactttagtgtgaggtactcctcgtaaaaaaaataataatccttgtgaaccaccacacccgccccccatgagtgccttagtataagagcaaaagattagaaacctaacatattgaaagaggatcattttgtcaaatcagaccacagacatgtgatttataaggtaacatgtcatcatcatcattttccctataaatcctataagagttttaaagttgcgtttacacacattaattcacaactactagtgaggcaggtaggtaaggctgataatagtagccccattttacagaagatactgagcctcagagagtctaaaccactagcttaaggacaggaagtgacaggactgagctaaacaccttgtccattacccttccccatcccatgctattcctcatgcatgatttattcccccaagccccatcttcttcattccaatgcaccctatatgtgtcaatcagtgcaaacctcaccttgactatactatagtggacatgtgcctaagactggcttcacgcaccgtttcatctcatccctggtcccaagcacaaaggacatggcccatagtaggttctcagtgaatatctgataaagaaaggcatgccaatgctcagtgcagatgctgatgcctctaacgagctgagacacacagaaaaacattaccactgttacagtaccttgacagactggggctggtgctgtccactgtcccaagttatcacaccgaactatatcggctcctctcagcatgaaaccttcagcacagcggaagctacagttggtgtcatactgaaacgctctcaaggatggagagcaatccatgcttccgtggacaggactctccagcggctcacacgaaatagctaagtggaaaaggtatcttctaaagccaggtaatggaagggccgggttcttcctcagaaaaaattcctagatgctatatctttcctgtccacattttcagtgtgttcagaaccctaaaacctccattttccaaaagagagactgcctggaacaccttcccatgcccctcttggcctgactcactctcacctgcccttcaggtctcagcttagacttccctttccttaggaagccctcccttcccaccttaactaagggtagaagcccctgcaatgtgctcccacagcctctgttcttgcgctgttcatacatgattgtcattcttccccattataccgtggtctcctcgaagttgggctcagtcattcatagttttattctggagctgagcagagtgttttgtacattgaaagtgctcattaaatattgacattatctgtgaaattgaacctgaaaagagtatatacaggaaaatgctggacttatagggaaaaaaaaaaaagctggactagcatagcttattgttgacactgttacctagtcctgtaaaatgatcctgaccgggctttgtctctagaacacaggatgtcatcctaatcagacttcagttgccaagtgagtgcagccaaagtgaattcctgagcacaattaagccctgagtgacctcagttctgataaagattggtttcctcatgctcttccttgataaagcatttcatttccaggctatttctgaaacttttcaaagtgtaaagactacctctttgctctgggctttgacctctggtttttacagactcagagcatttaagaaccaaaaatccggctgagcacaatggctcacacctataatcccagcactttgagaggctgatgtgagtgaatcacttgaggtcgggagtttgagaccagcctggccaaagtggtgaaaccctagtctctattaaaaatacaaaaagttgcctgtaatcctagctattcgggaggctgaggcaggagaatcgtttgaacctgggaggcagaggttgcagtgagctgagatcgtgccactgcacttcagcctgggcgacagagtgagactctgtctcaaaacaaacaaacaaacaaacaaacaaacaaacaaacaaaaacaccaaaatcctctagtgtttctctcttctctcttatgttttaggcaagaaaagtgaggttcagaagtgttaagtgacttctctaaagtctcatagctagatagtagcagggttgggcttgtcatccaggtctgggaattcactaatctatcgtaaatttcctattctcccattaccactgtccgccttataaactgagggtgtgaggcaattgcagagaattcattttggcggaattatgtaattgcctgggattgcatcacacactttttcgatgcagtgttccttcctttgcttctttgtcaaaggctaccctcaaagactacatggtgaaccactctctttagccaccttagccgctgctcccaactccctctcaagtataggacatggtcctatacctcggatatgtcagtagagcagaagctctatgctaggtactttatacatgctatttaattgtatactttttatgtacttaatcctcacaagcaccttgcaattcttagctccatttcacagatgagaaaaccatggttcctggaggttgaagagcttgctctagtgcaagaacttagaagagatcaccccgacactgagagcccttggcctctctaccatgccatgattccttcttggacagaatggaggttgctaatgaaaaatcctaccctcacaggttggcaagggtgcagaccagtgtccagagtcaatgcagcggagcatgtccaagcccctcactctgtagccgggctggcactcaaatttacagctggagccataggcaaaagcagtgagcggatgaacacagtccatggttccttcactgggggcttccaggtgctgacactgcacagctggagagaataaccaaggataaagagaaagatactgagaaaggagaaaagccacacagagagcaatggtggaaccacctctgaaatgcaggtggagctagcaagatgtaaaggtcaagagaccctaatgatgtttgtccagacttggattaccagttcccagggtgatctgagtctgttaaaaacaaagattcctccaagctgtattcttaatgtcctctattccctatacttctataaacctgtctcagtaggtcttctagtgtccacttatagatgtagaggccaccctttctaatcttatggggaaattatgaatgaggccattctgaaactgcctgcatttgtgtttggggaaagaaaggaatttttttcctttctcatctcagatgaacccaatctagctgaatggcaggtaggaagagaattaaattttggcaattcaggccagcttctccataagctggtcaatttcatctatgcactaagtaaggactgggtgcaatggacattatacatcccaactacctgaaactcacctttacacactggggctggggctgtccatacccccgaggctgtgcattgcaccacttccggtccaactaatgcaaatccctcttcacaactgaagctgcagctagactgatgctggaatgcttttgcagaatgaaggcaggtcatgtttcctcgttcaggaatcttcaggggtgggcactgggcagctaaaaccaaccacagaataatagtgtgagtccttggacaaattttgtccatcaccttggaagccttcaaattctgcagcagtcacaccttcccaaagtggcaggcaggttgatgcactagaatggttaaatggtgttttcaatagctgcttggaaagatcaaacacccttgtttttcatgtagagaagttaggtaaaattatcaaattaataattcttaacccctaagtcctcatcattgtactctgtttactttacaattaacaaagggaaagaggggtccctttgtaatgtttttgcctgcgaatcaacaattaaactgactaagtcactctacccataaaaaaataccatgaaaattgaaattaatgttactctggttgacagttaacagtgataaccagagttttccatctaacctagatggtcattatttctcacattttttaatggagaaagctcattgtgtcctcttctcccccaaaattctatgtcagtgaggatgaaaagaataaggtctacatacctaaacactgtggaggcttatttgtccagattccagaagccaagcattccagcttgctgggcccatttacttggtacccgtcagtgcagtggaagctgcactgcgagttaaaagagaagtttcccagagggtggctgcagttcatgagcacgtgttgagggagctcaagttctccacactctctcactgcaggagacaaaatagtgatttttattttccatgtagaattaacagcaatgtcatgtttgctgaaagctgtaactatttgtgtaaccctcttaactctaattttctaaacttttaacccaagctatccatctctacttggtctctttgtattggctgcatcttgggaaatagtcattctttcacaagtttttacttcaaacaagtaaaattagcctgaaagttctgttggttttgcttcctttccctttcccttttcttttttgaaatttatgagtcaatgttttctcccaagaataaaatgtttttacctagagtgtgtgtctagggacactgagtggaggagacagatgatagaggggggctggtaccatcctattctcactggagagacttcaacatgatttatttacttcttggcatcatctctagcataaaaccaaaataatatcaacaaaaaggaagcctcaccgtattcacattctggcccatagaatccagggtaacaggagcaggtgtagttcccgatggtctcgaggcactctccttgtttgctgcaggacatgtcctggcaggaggctgcatagatatggaaaggtcagagtcatggacattcacagatgtgaggaaaggctgaattctcgttttgaccacagactcatcccctctcagataggactgagctagccagacaagagggaagcacagtatcttctagagagccaacctgtcccttgtgaaaagcattgtaggggcctgctggagtattgcgtggctcccatttcatactgcatttagtatttcctaaggagggtattgttgtgtgtggacacagagggacaaatggagccaatgacagatgtgtggacagagaaaccctatgtggtacaaaatgggctgtggttttcaaaccaagcattgttttattatggaagcccaatgtcacgtattactgcattgaggttaggcaccagatgtggggcgtggggtcacacaggtgtgatatgaatcctggctctgctgcctacttgctatgtgaccttaggcaagttacttctctgagctcagcttgcacagtgttagagcccaaaccctttcacctttcatttgcttcaaatctatgtccagaatcctacagtggagaaacagaggagccaaatgagatgtttaagacgtactcatggtaaaggacaaacaatcttatgaggtgatgtttcatgagtctgaatacagcaggcgaagagagtactgactatggctgaactgccatgtcctcttcaccaagatagtgccactcaggtgacagaatagagaagggccatggtttctttcctgcaagaaagtattttagggtatatgcacttgatgagaattagtattagaattgatactttcaaagcactgagatgtttttattaatgaggtcatagttgggggtaagttctatggctgaactgttttctggtggttacttcctctgtcttaagccctgtccacatgctggttcacttggaagtatattacaaaagaatatccatatgtcatatgtggatatgctgtgctacatgatctctatgtttcctctcaattctgagatactaaaattctataaaccatgcaaggttctataggaagaagttcctgtggcagccagtgaatttggtgaagctgcactgagacactgggaagggttcaaataaagagaagatgtaggaggcaatagcagctaaatggatacaggtttggtccacatcctattcacttcgctccctgaccttaaccccaccaatgtcttaataccttacagtagcaacccctgcctgccctatgttcttggagcatacaaatgtttccccaattatagcttccttgggatctcagaactctaggggaaaaaaagagacaatgttctgtattctatcccatttcagggtttcctgaatagataggttagcaatttgtctattcctttggatctccagggagaagatgatttattcatgatgattcaatgaataaatcttttttcgatagcctgctctgaggtctaataattcctgacatgtggagaattattccaacaatcaaacttaatttcatattacagtaaatatatctatttctcatctcccatggataattgatgcttctctacatcctttacatcttagatggcaaaacgacaatcaatggtagtggctgcttagagtactgtgttggtggagataaaacccatctgtgttcaggtaaagttgtattaattagtgatgtctctaccactgttgtgggttagaggagtgtcatcatttatgccagtaattttttatcttttttctatcttgcaatttttttggcaagctttattgaggaagactgtcttgcagaaatggattttgaaggttgggtgtgaaggggaagtagtggcatattgaaacagctagtggcagtcaaggttatctgataagagataattctagggaggcatagcccagaaaggggtagagagctgactgggagagcagtaggatgagctaatatcctggtaatgtccatcctgatccatgaatatatgctcaattaatcaatttatttatatataaatgcattatttataaagtagatctgattatatgataatgcattcatggatatgttttgcctcagctaggaggcttggggagaagagggacaatgtagaaggcttgctttattctgtgtattctgttccatacctgtactgttgagggcttctgagggagaggtgtttaaaatctaaagaattcagaatatgtatggcagatgatttatcaaagaagcttcagagtacttagaaacttcctgctcggggcagtccataccatccttaggcacagtgttcgtgtgctacaaaggacagaaccggcccctctggacagggaagcaacatcagaaagaaggaatcagctctgacactaggctcgtgactagaggaagaccaagctttcaggaatgtctgcttactctggcactggtaaagttgagaattaaaatacactcgaagtatttcaccttcaattacttctttcctttcctgcccactccccaccactaccctcccaccaaagttcaatggatctaaagatatgttgttgttgaagagaaactataaagcatttacaatccttggttatattctcaaattgtctcataaaaatgtagagcaaagaatgtggtagtttacatggctaaaaaacaccaactttggaatcaacatgagtgtgaaactggctccaccatcaactagcttagaaccctgggcagattacttaatagctctgagcctttccctcatcagcaaagtaagagtaatagaaaaacctgactgatggagttgtcatgaggactaaatttgactaatattaaatgagcaaatgacacatgaactaaataaactaataacacaatgcctagagcatactgacattcagtagctattagttacagctgtgtcacctaggggcagggctaaatttccttccaatttacactctctgttatacaagacacaggggtgaaaaaaaagctctacacctaaaatttgggagactggtttctggtcctcactttgcttctgtcctgctccacggccttgagaaactaaaacctcgtgagtgtccttttcatcagttataagatgagacaggtgagctggatgatattaaaatttccctctagttttaagcagctagttttctctaattctgatcttatattcttcaaggtgctcaataatactgattgactaacaatttaccccttgatttcatgtcctgcctttgtatctttgtgttgactcggtggttatgttggccaaccagagaaggcagggttttttttttttaacaggaaagtttcaaagtagagaaggccctacctgtgtaacacaatgcgtgctttttcttcaagcagtgctcatcattccacttgccaggggctgacggactcttgatgtatatctccacgcagtcctcgttgttccttttgttgttaggttcattatcagcccagttctcagcctcgttggtgagagcctttttggttcccacccatgtccatgtcttattgttctttcggatcccaatccagtagtaggagctgtagtagggtaggaccttattgaggtaatcaatttcatttttattctggatggccactaagtctgtgtagcgattctggcagtatttacgggaaatattccatgagtatgcttttgtgctgtaatgataagtccatgctgccacttctttctggtttgttagttctagagtaaaggagagtgagtgccaggttagtacccctcaccaaaaaagaggccgtgatcccaagtatgcttctgcatactcagatgaatttccgaccagaacattaatacacaaaacaacgactagtttatgtctaatgtagttgtttgaaggaaaaagagtggtttccacctttcacttaaaagtgtgaatgatgtcagaataggaaaatgtcatcttctgaggatccttgatgttaaaggtttggaatcataagatatcaaagttaggagggaccctggaagtcatctaatttactcctgtccttttataaaagaaggagacataagtaatttgcccaagctcagattaaatgacatataaaatgtcttaagggcaagctctacctcttcacatggaaaataacatgctttatgacctggagcctaccagttggtccagcctcattgcccactgtatgtactttctcagcaaaacagaattcctacttccttgaatttgcacatgctctccccacaatcctggctgtcctctcttcttatgtctgataaactttactccacctattctccatggctttcccaggtggactctgtgttccttcctccaggctcccacagcacctcatccctgcctccattgtgctcattgccatgtacggtaatgtctgtttctatgatacagtctacatctgccaggttgtaaatctccgacggtgttttctttttagctttggatccttagcactgagcctagagtttagcacttaataggccttcaataaatacttgttgaatgagtgaaacacagtaggtttgtggcagaacccgggtgggaaatcagatatcctgatctgcaatcttatagtctttccattcttcttggctgtttgtctttcattaactactctacttcttccatgtctgaatactcccttattaagatagggctcagaacagccctttttcacaagtgtttttgataccaaatgaactaaagaatgtgcgtttcaaaagtataaaggtactacagcactcttatcatagtctgtgggagtccacccggggcaggagaggccatttcccacatgaagaggtgtacaaagcaagcaatcaggcctggaaatgggtttctttcctgtttatttaaaggcttgtttctatccaaccctctcctctgctgcctgcatgagggttagtcatgcttgtacctcccttgctgacatttccagggcattgttttgccttaaagacttcattctgatatagccagggctgcattatgactttcatagacttcaggcaactttgcctatgtaggcttcttcctccatgctaacatattaaaaattctattttgcaactgcactggtacaaagatgaatatatcactatatattaaaacattttctttgacttcaaagaaaataattataaaagaaattcagacgtgtgtgggtctttgaaaattttgtgcgtctgtgtctactgtgcctaatggatacattcgtcctggatatatcattttaagttctttcctatgccctttctaccaatatgatggcgttgggtacatttgtcttccagcaatctggacttggacagttttcccatgcctcaaaccaactggctacaatccttaaatttctcacacatagatctgggctctaccctaattacttaggcctaagtgaaaagttagcataaagtttaccagagatcagggcactgaagcaaaggagttgggaaattccaaagaccactctctggaatctctggtacaagatggctatttggcagttggcctgaaacaagaagagaaaactttcttttagtatccatacaccaccaacatggccaaaaataattctagttaacaatcattatgttgaagtataattgtgccaatttccactggaagagtggttcaagccctctgcttccttcttgcttctcattgccctgcttctaagttctaccctggatggacactgtagcaaggctggggacagagttcatttcttcattcattcaacaaatgtttattgagtagtttgtgccaccaatgtttttattttaagatacatttttaatgtgtatggaagaaagctaaacacattaatatggctgtcattattattataaaacaatctttttaagaagtggtatgtcatacccaagaataacagaaagtcacatgagaacttcctgacccacacaaataatgtctaacctatactttgaggtgcagagcatcaacaaattgtgttatgctatgccatctattttgtactatggatctttgttttatcttcttgctttttcatttctgtacacatctacaatactattcaatgtttaatatacatatgtatgtatatatttaatatttcttaatatatgcagtaaacttgttccccttggatctatagcaactattatttctcatgaactctcttctgttgggatttcatcaaatctatgaatatttttaaaatgtttttggggccaggcacagtggctcatgcctgtaatcccagcactttgggaggctgaggtgggcggatcatgaggtcaggaattcaagaccagcctggccaacatagtgaaaccctgtctctactaaaagtacattaaaaaaaaattagacaggtgtggtggcgggtgcttgtaatcccagctccttgggaggtcgaggcaggagaatcgcttgaacccgggaggcggaggttgcagtgagcggagatcacaccactgcactctatccggggcgacagtgcaagactccgtctcaaaaaaacaacaaaaaatgtttttgggcatctaagttctagtgatgctcatcttgtccgacttcctcatgttgcacatgaaaatactgaagcttggggcatctaaataacacgttcagaatgacagtagcagagcttgactttgaaacaagaaagagctctttccactgtacttttttttttttttttttttaaccttcattaacctccaggcttctaaatcccatgctgcattgctgttttggatgataaagcatgcgacatgaccaagcctagctgctacatcagttcccctctaaagccactcaacattactatcaacataaaaacagtgcatttgctatgcatttgcagttttgtcactatcccagccagactgctacctaaaacctttcctgtaaagaaatctcaaattgcctcagaccacaatttggtctgtgacaatttgctgcgaggttatgtgtgtgttcgtgtgtcatgccccagtgatggatgatgtagcgtgcatgggacggtgtgcggttgtgtgtatgttcgtgtgtcatgccccagtgatggatgatgtagggtgcatgggacggtgtggggttgtgtgtgtgtgtgtgtgtgtgtgtgtgtgtgtatgtgtcatgccacagtgatggatgatgtaggctgcatgggactgtgtggagttgtgtatgtatgcgtgtgtcatgccccagtgatggatgatgtagggtgcatgggacagtgtggggttctgtgtgtgtgtgtgtgtgtgtgtgtgtgtgtcatgccacagtgatggataatgtagggtggatgggacagtgtggggttctgtgtgtatgtgtgtgtcatgccacagtgacggatgatgtagggtgcatgggatggtgtggagttgtgtgtgtgtgtgtgtgtgtgtgtgtcacaccccagtgatgagatgtagggtgcatgggactgtgtggggttgtgtgtgtgttcgtgtgtcatgccccagtgatggatgatgtagggtgcatgggatggtgtggagttgtgtgtgtgtgtgtttgtgtcacaccccagtgatggatgatgtagggtgcatgggactgtgtggtgttgtgtgtgtgttcatgtatcatgtcctggtgatggatgatgtagggtgcatgggacagtgtgggattgtgtgtatgtgtgtgtcacacccagtgatggatgatgtagggtgcatgggacagtgtgaggttgtgtgtgtgtgtgtgtgtgtgtgtgtgtgtgtgtcacgcccagtgatggattatgtagggtgcatgggacagtgtggggttgtgtatgtgtcacgcccagtagggtgcatgggacagtgtggggtcatgtgtgtgcatgtgttcatgcacttttgactacagcctgaccagataccagggagaactcaactcaaaccagttaatgtgtcccagagagtagagttatctcataagcctagaacttttcatctgggagcttctgaatcttgactttggtaagtaggcatattttgtgttcttataagctgctgatctctgcaggacctatgattaaacactgagagtatcataacgttatgatttacagctgtttatttgcacaaaatgcagagtgatcgataaccctttggtgcgaacctaaccccactgctttctctgaattgtgttgtgtcacaagctgttcttcctatcacatttcaaaatgcaccattccaaatgctgaagtggaattcttcaaaccaggataaggctgacttcccaaggggttcacaagcaaagagagtgttaattaaatctgtattcagattctcaactttcacatatatactttcttaaaaacaatctgcctaaaatacacctttctcccactttataagagaaaaattataccttttactaatttcttatttattccagagctttgcctttggatataaatacattcgtatgccagagatgattcgaaatattggtataggtattaagaatttgaatattgtaaatgatattgcagcaaatccgttttcaagtctagtgatttccatttatttcctttcatcagctttgagggagcacccgattaagttgtcaagtctgactaaattttgatagtaaatcactatataatttggggcatataacttggaaggacttcaaggaattgagacattgctataataaaacttctaattccatttacttattcatatgaatgaagtttctcaatgtttaaatccttgaaaatgaaatatgggaataatattgatgccaaacttgtctaattttgttgataagtaatattcattcatggatatatgaacaaatgagggaaagctcctcctgtcttagagatgaatctttaatagcaatttaaatataaaggtttaagttacttgtcaaaacttgcagtatatttactttatttaattgtgtactgaaagtagttgtcatgctaactcaatagaaaagaaaaacattttaacacatagagacttacagttgtagaaaattgaaattttatatttttattttgcaaagaagtataataatcaagaaaatactttaagcttaaaatgtgtaatcttaggctaaatactgtagaagtgggatagaaataactattcaaggagagaaaaatgaataatataaaatttcttaagagcctgcttgtggtcttttaagtgatgaggattgcagatcatgctagtactttattccattggataaactttaagaaattatgtaacaattttatttttacagtctaatttttgtaatacactggaaaatccaatcttcttttgcttttaaaatttgggataaaaaattgtagctttccacttagaaaggtgtaagaggtaacatagtgttccaggatatttttggaggtataggagcaaaaatattgctgctgaagagcacaactctgcagccttcatgaaggggacctgagtgcttgcctttgaacctgggctttgctctattcagacagattgcagaaggagtgcaacgattttaaatttagtggtactcttcctgtggaagtggttttctccctgaacagagtatttctagggatttccctggctttggggccagctcacaagagtgtgtagggcgaaggagtcggtgaggctcccagtctcccatcacagtggccaaccctacccactgtttcctgctttgacttgtttgtttaaacttttaaataagatttggtttaaacaaaatttccaaaaagagatgtttcccattttaacctgtttgtttgtttgtttgaactttttttaagcaaaatttcatcagcaaattctctaccacacaagataaaacaaagtgagagagagcgagacaacttgttttaaacatttgaaggttttagaggactggtacagtgcttttgatgaaggcacaacatctaagaaaggaaaatgcaagtcagtgtgcatcccctgctttaatctgacgtacttttctgtttctatgcatcaccaaataccaagattcacctcttacaggttatttcagagctataggagaacataaaggtcacttccaagccaacttagcatttatctgctgttctgcaggaagtctttcagacttcgaatgcctaagatggggcagccaccactccccaccactgagactcagtgagcgtaaatgatttgcccaagcttgctcacatgaatgtgcatagggttaacacagttattcttattcttccagggcttatgaattttgaaaatctgataaaagccgtggtcagatttcttcaaaacaaatgcatgcttgcagtagtttagagaatctcagatggttcatgacctactaagtctgtccatgtttaatgtggcccaagttcaagattctgtgttaactgtaaggcaactgatagggattttgtgtggaggtatggagaatggatgatgtttaaaaatcttctttgagtaacagttttcctctgaaacctgcttggggtgggcaggccttctcatacctgctcctactctgcattatagtctgcaggatgctgctctgtcctgtgttactaagcaagttaaatactaaaacaagaggaaattcctctctagaagcatccacatgctctgctagtctttaatgttctctggaaggctggttcaactggaagttgctggaaaggagtcagagactgggtcattagaataacatcctgtgcctgtgtaagccttcattaagtaccatgattatctttaattttactttaataaagaactgggctggtgcagtggctcatgcctctaatcccagcactttgggaggccaaggtgggcagatcacttgaggtcaggagttcgagaacagcctggcaacatggtaaaacctcgtctctactaaaaatgcaaaaattagccaggcatagtggcacatgtctgtagtcccagctacttgggaggctgaggcaggagaatcgcttgaacccagaaggcagaggtggcagtgagccgagacactccagccttggcaacagagtgagactctttctcaaaaaacaaaacaaacaaacaagcaaaaaaactaataatgattgcagggtgaagagaaaagcagagagaaagtggaagaagcaaatgccttgacctaacttttcacacaaggaggtaccagaggctagtaggtgtcccatggcttgccacgttccaggtggcttacaaagttggcaagaatagtgccacagaaaggagatcttgttctttttgtctacattgtagaccacagctttgtgcttttagaaaggcggaatcaaacaatgtccctcccttgaccctttgtcctcctgcccacatctgcctgtttctctccttcctcttatagctaaactttcttaacttccttgcctcccccttactctccagcccactgcccgaccatcctatcaaagtgtccctgcaaacttcattgctgacatcctcattaccaaaccaaatgaagactttccacccttatcttccttgacctttctgtagcagtaaataccactacttccttttgcctaaaatgcttcccttagctcttctgttgttcttctgctctaatgtttgagaaacttttctgagtcttcttctgaatctacctcaatcctctgccttcccttgcagaggtaagtgtttctctaggttcccacctccatggccctattctcttctcattcttctgctttcctgggaagtaaagatgacctccttatggtcatctgtttccaatgtcctctaatcagcatctccgtttctgaatattctcttgagcaggaggtccacaatttaaatgcgcaacaaacatgtgagcatacagctgaggaagctactgacagaggcttctcaagggcaaggactattacttactcaggtctgaatccccagccatggtagggcacatactcaatactcaataaacattttatggataaatatatgaatgaataatggcagaggaataactgaaagtaagacaaaaatatgctaaataagaaaatgttggaaaaatacataataattataactgaatgcattacttttacagtagtgataatagctaagtgaacaaataaaatggtgaaaacagacataattccagtcctcatagaatgcacattctattggtagagaagacaatgaaacaaatactaataactacacaacagtactaaacaagtaaacatgaaaaatattaacagaatatagccataagtgctaggtaggaaatgaaacttatgtgatagaatgactgtgtcactatgttggtcaggaacgtcagggaagacctctttaatgagataatgtttaagtggagagaagaatgactgcaagaaaccagccagtgagaagcaggaagaagagcattaaaggaagaagaaaaagctatttcaaaggccttaaggtggaagcaaactgcagtgtgttcaaagaacatgaagacattagtgtggccagaatggaatgagcaatggagagaaaaatacgagccgggggtagtgacagatcacatcgggctttgggatccaaaacaaggggatgagattttattctaagtgcaatgataagccaacggaagctgggcacggtggctcacatctgtaatcccaacactttatgaggccaaggcaggcagatcccttgaggtcagaagttcaagaccagccttgccaacatggcgaaaccaactccactaaaaaatacaaaaattagctgggcatggtggcgcatgcctgtaatcccagctactcagaaggctgagacaggagaatcgcttgaacccaggagacagaggttgcagtgagctgagatggcactactgcactccagcctgctgaagattgggagatcctagaggttaactgaaaaggtagtttgagaccatatcttgtgggtcacaaataccagttggcagaagggatacttctgaacagagaagtatcatgaacacatgcacttaatggtggtatgattttttttgtggggctgggggacagggtcttgctctgttgcccaggctgaagtgcagtggcatgatctgggttcactgaaacctccacctcctggcctcaagtgatcttcccatctcagcctcctgagtaactgggactacaggcatgcatcaccacacccggctaattttttgtagagataagttctcactatattgcccaggctggcctggagcccctgggctcaagcaatactttttctttggcctccaaaaatgctgatattataggggtgagagtagtgcgatacttttttttttttaaatgagttacaatcagggagattgcactgcaaaagaagaggctattgcaatggtcccagtgagagttaaagagggacaggtttggtctggcatcagtgggaatgcaaataggggaggtgaatatgagagttgttgaggatgcagaactatacaacttgttggtagcaaagcccagatgttacaagctattacagctaatacattagttcccttatgtttctggacggtggtggtgttagtggtgtggcacagatattggtagcccagcttaggggtggaaaaagaaatacagtgagaaaagaggttgtctctaagccaaagagcaaattatgaatatagacaagaagggacccaggacatcaacacttagaatccaagcatatatttaatttagactaccaattgccattattttgagtaaaatattagcattaaaaataaagtacgacacttaaaattttttaaaaagtctattggatcagagatgagttatatctctacaaatagtgaggatttgctctgtatttgacttcatgaagtttctgatttactttttaatcaaaaagattagacaccttgaagacaatataatgaatgtcatttataaaaccactgtgtgcctactctctaggtttaggtccagggttttttctaaacacagttttttatgtagtaagtcattttgatttttgaggatttgatcaataagcttctacttaaagatctctgaagatgcacattctaagagctggtggctagcccaggagagtctgaactattttagttgcattttgaaaaacaggtaatgaaaagaagagtaaggactggaagccacataaggtggttaaaaggtataaatggacgaaaatccagacctgctccttagcccactaaaactttttttttgttttgtttttgagacaagtcttgctctgtcacccaggctggagttcagtggtgtgatctcaactcactgccacctccacctcctgggttcaagagtttgtcctgcctcagcctcctgagtagctgggattacaggcacatgccaacatgcccagccagtttttgtaagtttagtaaatatggtgtttcaccatgttggccaggctgctcttgaactctcgacttcaagtgatctatgcgcctcggcctcccaaagtgctgggattacaggcatgagccactgagcccggccatagcccgctaaaactttgacaaacatcagtgcaatttaactataagttcccaatcaagagctactcctctgagatctatctgattgaaaataccccaccagaaaaaccttatcctcattttctcaggtcctaaaagttaattaaagccactctctgaacttgaagcaaaatttacacaggcagtttgaggtttctgaatctttggggccaaatgtgctcagaggaaaaggaagaggtcttgtctttgaaatattaaaaaccattccagggctggggccttagcacttcgctgtagagctcaagcctaatttcagggtaccaagagaggggcttctgaacataaagcccaggaggcaatcgagaagggttcttaccctgggatccacatggaggtctgggaacctcctgtggttgtctctaaaggttggtgtttatgtcgatgtttttgctttcatctgggaaagacaagttgtaactttcatcaaaatctcaaagaactctctgatccaataagttcatacctttgaaatagaggaggatgccaaggagagtagaaggaagagaggaataactgctcatttaagttaaccaattcagaagtatgacatgcaaaaagacaggacaaaagtaattcatatccttaggtcattgtggttcaaacttaagacaggctcaaactccttcctcttctctttatcatactcttattcctgttttccccaacacagaaacccacattataagtacttgaaaagtgtgctatagtaaagcaaagcagtaggatgaatcaggtgtatgcggtacttttttctggagtcccacagaaaggtgctcaaaaacagagacctgcctggttcctccatagccacagactgcaggatttcggaccctgggactatgtgggatactcttggaaagtctgaggaaaattggaagtagcttaaccatgtgcattttatctaggtgcatataacattgctgagttcaaaatgcctagctatccttggatcttccctgaattagaagtagcctaaccacgtgcatcttatccatgagcatataacattgctgagttcaaaatgcctagctatccttggatcttccctgaatcctaaaccccactattcctaagaattttctttttattgtaacaataatggctaacatttactaatcacttactatgtgtcaggctcagatctggatgcttttcagcaaaatcttatttaatcctcatgatgaaactatagagtattattactatatccattttatagaagaagaaactgagtcattaacaagattgagtcttagggcagaaaaggaaactatgtggatattccagatcagtcccagaagattcataggctcacagaaagaaatgggagggatggggatgagaaactattcaattgtaagcttgtcccagggcacctacccagtcttccatttattccatcatttatcccagagagaagtacagtcttggaaaatggggtgacaggtttaccatgatctattctcagagagcccctataaattctagtaggaggaacagcagctgcggagccagaggacaggccccagatcccaacatcatgtagcctaacagtgaagcttagataaaacacagcctctgtaaaccacgatggctttatttgtaaaatagaaatagcaacctcaactcacaagggtgttgggagggtcaaagtggacagcaagtttaaaagtactcacaaaatctaataggcaattcaacataaaactccatggctatcgctgttcctcactttctgaacctttacctgcctgactttactccataccactccaactcacttcaaccacttcccatgcagaaaaaaataaactcaccatctcctctgtgactctgctggttttctgccttctgcccaacccagactgcttacagtctcactgcctcccctcagtgtcaggctgtttagaaaaacaacttcctattcacattccagaaactcaccacagcccttcccatgaagttagaatgttgataatgcaagagtaatgttggcagcttagaaatagtggttgccaagaggcaaggggtcacccccttccatggaagatggtctggaggcaggcgcaaggtgaattactcctggatatcccaggctgagcaatgtgggaacagtacacacacaaaggtttccttggattatgatataagctccaatttaaagtagtacatttggaaaacatgctttgaattaattacaatgtgattttccagtgcccattttccagtaattatgacatgtcagtgaatgtttactattccggcagccttctgagggaaagaagcaaaattagtagcacaaaaaaaaatagagagaaatggaaaaagccactaacagttttctggcgcttgggaaattttattggtaagtttcaaaatgacgtattaaatagacataggtcatgtgaaaggaattctgcttcttatatcagaaataaaaaggtatacaaatagatacctttttattttcctcttcccatgggatgtgtaggaccaaaaagctgttggcatagtggttaagacttcagctgtgctgttaaactgcccgagacccatcctggctcctcttctggctatctactgggcaaactacttaagctctctatgcctctgtttcctcaactgtaaaacagaataacagaacttgcctcaccgggttgttgtaggatgaaatgagttaatatgtacagagtgattgaaatgacacttggcccacaattgatgctcaacaaatgttagtgattattattacttttcagattgatctcagacagcaaaatcaagtatcaagtatttagtttcaagtcagaaagccataactcctatttatactcttggaattctattgtacagtagtaggtattattcttcattcacttcatgatggttacagcttgtaaataggcatctcatggataaatttaaaatggaatgaagtagaaacattggaagaaagtctaaaggtaaagatgaattagggtatataaggctgcatttgcacgttggaatttgggaccaagaagaaaaaattaattatatagtagaagtagaaaagatggtgaaggaaatgctgttgaaggaatgactgtaggggaataagggaaacttagagagaggaaaaaatgaggaacttcttggcagcatgatgcagttcagagtccagaccctagagtcagactgcctggctccaccacctaccagctgtgttgggcgttactaatctccctataactcagtttcctcagtgatgtggtttggctgtgtccccacccaaatctcatctggaattgtagctcccataattcccacaggttgtgggaggcacctggtagatcattgaatcatgggggtggtttcccccatactgttctcatggtagtgaataagtcgcatgagagctgatggttttataaggggaaaccccttttgtttggttctcatttctctctcttccctgctgccatgtaagacgtgtcttttgctttctaccatgattgtgaggactccccatccacgtggaactgtgagtccattaaacctttttttttttaataagttatccagtctcgggtatgtctctatcagcatcatgagaacagaataatacactcagcaatgtgaataataaggataataatcaccaaatacatagacatgtaaggaccattaaatgaatttaatgtgtttggaacaatacctatcacgctgttaagtgtaagtttaagtgttggctattattctataagacttgcctccatgtctttctgttcttactttcactcaccagcccctctttttggcattgcctcatgttagaaaaaatatatatagtctcagatggggatgaggaagtgtggtatgtagactagtaggttctttttttgagacagggtctcactctgcggcccaggctggagtgcagtggcatgattactgcttgctccagccttgacctcctgggctcaagcaattctcccacctcagcctcctgagtagctgggactatagatgtgtgccatcactactggctaattaaaaaaaaaaatctctagagatagggtctctctatatttcccaggctggtcttgaattcctgggctcaagtgatcctttcacctcagcctcccaaaatgttgggattacaggcatgagccaccatgcccagcctggtagtttcttatttataataagtttgatattaataagttcaattgatcatatgtttttaagtttgatattgttaaattttagtgaatataaggaaagcataaaaagattcctatgcaggtgacattagcaagatggtggagtaggagatgtcagccttatgccccaacaaaaaaacaaacatagacagttatacacaaaccaaaatagccctcacaagggtggggagttgggggatggggctcaagagcctgttaaagaatttggaacaacacaatggagaaaagaaagaatatccatgtagaagaatcaccggtgagactggcatatatgagacaccaggagatagctacgaataaagaaatttgtaggctatctgtgtcagtcatgtgacacagagccactgaggcccccagtgtcctgctccacagaggacactggcatcttttatccaacagccattcccatagcaggatgctaaaaagggaaacacagttgcactacccctcacaccccctcaccaagaagcagctattgttgcactgccccaggactggggccagggttaccacctctcacaagtctatgtgtgttcctgatccccaaaagttgtggctgctctacagatattcacactctggactgtggctctgtggctgcagtgcacctcctcatgtctcagacactggagtcactgctgttgtgaactagatctcaccctgggaccccaagccaagttctctctgtgaaagtctttgctccagacactagttcagccactgtagaaaggtaacccatattctcaactccagagctgctgtagtaatgtgcacacctgcgctccagaccctgtctctgaggctgtactacacacacccacacctccaacaccagagccaccactatagtgagctagtgaacaccctgggtcctagagtcaaggtttctctgtgcctgtccatgctctagtcaccagctcagccaccaaggagagctagcccacaccctggatcctggagccactgtagctctgcgtatgcatgcagtaaagtccctggctccttagctgctttataagtacctgcattttacacaccattatcaatgtgatagtaagtatgcctgtgccttgggcactggtaccattgctacaattgaatctggtgctgtggtccctccatgcatgcccatgcttcaggccttggctcttggccactccatgggcactgttcatcagacaccagtgtcaccaccaccaggagcaggcctgcaagttagacctaattccaagagggatgtcctcagtcatgacttcccaggtggggaaaaaaagagatatggaggacttgtcacaattgaaaacctcaacagcctcattgccactgtagatacccacagtgttggcctctaaggatccctgtagtattcactaacaccaacctcagctgacagatctgcatggagaccacacagctttgcccctactgaagtcagaacttttgcatcccacccagccagcatcctcgcattattccacataagaaggtatttctccaccaaagtcagcccatacagcctgaaattggggcagatccaccagatgctcagacagcagtgtaaggcagcaagaaacatgaaaacccaaattaaaatatcaccacctaagaaacacaataatttcccagtagctgacccaaaagaaatggagtactacaaatggcctgacaatggattcaagataattgtttttaaagaagctcagttactttgaagcaaacacagagaaacaatttggtgaaatcagagaaacaataaatgcacaacataagaaatgtaacagaaagattgaaatcataaaagaaattggagctgaaaaatataatgaatgaagtgagaaatgcagtagaaatcaccagtagcagacttgatcaagcagaagaaagaatctgtgaactgaagacaggtttttgaaaatatacagtgagaggagaaaaaagaatgaaaagaaatgatgaaagcctacaagatttatgggacagcatcaagagagctaacattcagccagactcagtggctcatgccataatcccagcgctttgggaggccaaggtgagtggatcacctgaggtcaggagtcaagaccagcctgaccaacatggtgaaacccagtctctactaaaaatacaaaaaaattagccagggattgtggcacatgcctgtaatcccagctactggggagactgaggcagcagaatctcttcaacctagaaggcaaaggttgcagtgagctgagatcatgccactgcactccagcctgggtgacagagtgagactgcatctcaaaaaataaaaacaaaaattaaattaaaaattaaaaaagagagctaatgttcacattacagtagtttaagaaggagaaaatagaggaaaagggggtcagaaagcatatttaaagattgctagctgaaaatttcccaaatctgaaataaaatattaatattcaggtacaggaagcttaaaaatctccagtcaggttcaatccaaaaaagactacaccaagacataataatcaaactatcaaaaatcaaagacaaagacaggatcctaaaatcagcaagagaaaagaagcatatcacagacaagaattgcaataaggctatcacaagatttctcagcagaatgcttctaggcccagagagagtgagatgatatattcaaagtgttgaaagagaaaaaactgccaaccaagagtcccatccttcagaaataaagaagagataaagactttcccaaacaaataaaagctgaggtagttcatcaacacgagacctgccttacaagaaatgttaaagggaattcttcaagctgaaagaaagggatgttaattaattacatgaaaatctacgaaagtataaaagtcacaggtaaaaataaaaatacagtcaaattcagaattttccaatattataattgtgctgtataaatcacttatatctttagaatgaaggttaaaagacaaaactattaaaaataattataaccacaataagttaacagatacacaatataaaagatgtaaattataacatcaaaagcataaagtctgaaaaatattaaaaacctataaaatgtggagggagagtaaaagtgtggagtttttttatccttgaagttaaattttatcagcttaaaatagcctgttataactattatatgttttatctaagtctcacagtaactacaaagcaacaacatcacattaaaaggattattcaccatgatcatgtgtaatttacccctgggatgcaaggatggttcaacataagaaaatctataaatgtgatacacacattagcagaatgaaggacaaaagccatataatcatctcaatatatgcagaaaaagcatttgacaaattttaccataattttatgataacaattggtaaagaaggaatagtgccctcaggcaataggaaggaataataccctcaggtgtggaaagaaagtaacttcaacaaaataaaggccatatacataagcccacagctaacattatagtcaatagtgaaaggttgaaagcttttcctgtaagatcaggagcaaggcaaggatattcacttttgccacttctatgcagcacagtactggaaatccaagccagagtaattgggcaagagaaagaaataaaagacatccaaatcacaagaacttgtctatgatttcagacaacatgatcttatatatagaaaaccctaaaacatgatcttatatgtagaaaaccctaaagacttcataaaaaaaaacttttagaactaataaatgaatttagtatagttacaggatacaaaatcaacatgcaaaaatcagcagtgtttctcatacactaacaacaaactatctgaaaaagaaattaagaaaataatctcattataccagctacaaaaaaacacacttaggaataaatttaaccaaaaagataaaagatctatatactgaaaaccatgaaacaaattgaagaagacaaaggaattgaaagatatcccatatttatgaatttgaaaaattaatattgttaaaatgtctatactacccaaagcagtctgcagattcaatgtaattcctatcaaaatttcaatggcatttttcagagaaataaaaaataacaatcttgaaattcatatagaaccacaaaaaaatcctgaatagccaaagcaatcttaagcaaaaagaacaaagctagaagcagcacactgcctgatttcaaaatatactacaaagctatagtaattcaaacagcatactggcataaaaatagatacttagaccaatgaaacatagtagaaagataaggaatagattcatgcatttacagtcaattgatttttgataaagatgccaagaacattcaatggtgaaaggagggtctctttaataaatgatattgggaaaactggatatctatataaagaagcttgaaattggattcttgtctcacatacataaatcaaaggaaaatggattaaagacttaaatataagtcctgaaactataaaacgattagaagaaaacacacataaaaagctccatgacagcttgcagtgagccgagatcacgccactgcactccagcctgggcgacagagcaagactccgtctcaaaaaaaaaaaaaaaaaaaaagctccatgacattaatcttggcaacgactttgtatatgaccacaaaagcacaggcaacaaaagcaaaaataaacaaatgggataacttcaaactaaaaagctttttccaaagcaaaggaaacaattgacagagtgaagagacaacctatggagctgaagaaaatatttacaaaccatgtatctgatagaagattaatatgcaaaatatgtaagaaactcaattgcaaaatgcacacacacactcgcgtacacacacacacacacacatataactcaatttaaaaatgggcaaagaacctgaatagacatttctccaaataagacatataaatggccaacaggtatatttaaaatatttgactaatcatcagggaaatgcaaattacaaccacaatgagatattacctcatacctgttagaatgactactataaaaaagatgaaaggctgggtgcagcggcttatgcctgtaatcccagcactttgggaggccgaggctggcggatcacgaggtcaggagattgagaccatcctggctaacgcagtgaaaccacgtctctattaaaaatacaaaaaaattagccacgcgtggcggagggtgcctgtagtcccagctactcaggaggctgaggcaggagaatggcgtgaacctgggaggcagagcttgcagcttgcagtgagtcaaaattgcaccactgtactccagactgggtgacagagcgagactctgtctcaaaaaaaaaaataaaaagatgaaagataacaagtgttggtaaggatgcaaagaaaagggaccactgcacactgttgctgggaatgcgaattggtagagccattatggaaaatggtatggagtttcctccatatgacacaatcccaccactgggtatgtagccaaaaaaaaaaaatgaaatcagtatgtcaaagaaatgctaaactcccatgttttttgcagcattattcacaatagccaaaatatgaaatgaacctaggtgtctgtcaatggacaaacggctttcaaaaaaaagtggtatatacacacaatgaaatactactgagtctttaaaaagaagggaatccttggctcagcactgtggctcacgcctgtaatgccagcactttgggaggccgaggcgggcggatcatctgaggtcaggagtttgagaccagcctgaccaacatggagaaaccccgtctctactaaaaatacaaaattttccaggcgtggtggcacatgcctgtaatcccagctactcaggaaggctgaggcgggagaatcacttgaactcgggaggtgcaggttgcggtgagccaagatcgcgccattgcactctagcctgtgcaacaagagtgaaactccgtctcaaaaaaaaaaaaaaacccaaaaaagaagaaggaaatcctgtcatttgcaacaacatggatgaacctgtaggactttatgttaaataaaataaaccaggcatagaaagaccaatatgtgatctcacttatatttggaatctaaaaacactgaactcatagaagcagaaagtagaaaggtagttactaaggactggaggtgaggtgtgggaattcggaagatgttggtcaaaggatacagagtctcagttaggaagagtaagttcaagagatctattgtaccacatggtcactacagtttataacaatgtattatatacagatgattcctgacataaaatgtttcaacttaggatttttgactatatcatggtgcaagagccatatttattcagtatagatttatgatggggttatgcttggataaacccattgtaaattggaaatatcgtaagttgaaaatgcactttcaactttcaacattttcagcttatgatgatgggtttatcaggatgtaacatcattgtaacttgaggggcatctgtacttgaaaattgcaaaaagagtagcttgtaaatgttctcatcacacaaaaaataataatgtgaggtcactgatatgttaattagcttaatttagccatttcacaaaagtatagatatatcaaaacattgtgttgtacaccataaatatatataatttttatttatcaattacagttaaattcatacatacatacatatacacatacccaccaaaaataaagaaaaaagaaaatgaaaaagaagaatctctaggaataggaatgagaagaaaaaactgaatttgtttaaaagctactcaggctcaataccattttctcatatggatataatctgtgtagaaaatttgggttgtcactaaaaatgggatataattccaatataatttaattagtagtgttatatatctggtttgtattttttttatgtcttcagattataccatacattcccagagggcagggatcctttcctatattaatcttccatcacctgaagtatctagcagagggcagagagacactcagcaaatacttgttgattcattggttgattcattagaccccaaggggacacaatgaaagtgctccctcccatgttcctctctgaattctatttatctcattacactggtgcattcaaatacacaagaaatagctaagtccctttgagactcctgagagtgtgctagcatagggattcagtcatgagtatatctcatgaagcccatggttttgttgggggtgggggagcagatattaaataaaaatcacacaaataaattcaggaagaaaagaatgtggtacaatgaaagggcatgataggaattggaaaactcctttaagagaacagacacttctcaaaagaagacatttatgcagccaacagacacatgaaaaaaaatgctcgttatcactggccatcagagaaatgcaaatcaaaaccacaacgagataccatctcacaccagttagaatggcaatcattaaaaagtcaggaaacaacaggtgctggagaggatgtggagaaataggaacacttttacactgttggtgggactgtaaactagttcaaccatggtggaagacagtgtggcgattcctcagggatctagaactagaaataccatttgaccc

SEQ ID NO: 419 - DNA, 34411 bp, Homo sapiens
agcccactacatctctaaatccatggggcgaactttttaaaaatgaaaaagggtcattgaaaatcctgtacttttacatttatttaaaattatttaaaatgtatttaaaagaatgtatacaggaaaaaaatgtatactgtacttaagaatgtagagtgagttgctctcatatgcctgaccccctaactctagattcaagcattcttacccaatttttgtgtatctgcttaaaatctcagtgcatgtacacaattttccccagaaaagggtaattaagccattcacttccatttagaaaaaagattggccgggtgcactggctcacgcctgtaatcccaacactttgggaggctgaggcgggcggatcacgaggtcaggagatggagaccttcctggctaacatagtgaaaccctgtctttactaaaaatacaaaaaattagtggtggaggtgggcgcctgtagtcccagctactctggaggctaaggcaggagaatgatgtgaacccgggaggcggagcttgcagtgagccaagatggtgccactgcactccagcctgggcgacagagcaagactccgtctcaaagaaagaaaaaagatgatttctaagattagtttctccctggcaggtctggcctgctttggcgggagagtagggggggaatggtaggagtcatggaaccggctagttgggaaatgctggctggggtagaggcctcttggaaacagctgcagaggctgagggcccagaaagatctgtgcagaggcccagaaaataaattcacctacttctgttttgctcagaactgccctcaatttttaattgaagcaaattaaaacttcccaaaaatattagtccactttcttggcaaggtacacagccccttctcagtcagtgattttggaccatctgcaaacaggagctggtactggtcctgaggaaggcctttccctggccagaggctgcccttcacaccaggcctgtttgcaggcacttccccagaagccgggtcaaatcaggccatggtgcagatggggcagaataatctccagtcattcaaggtgattggtagagaagtgcgaggcagggagttggaagaggagttccttccatttctttgtgcttaccatctctgtgaacaccttgttttctagaacagtgcagtggagtcttctgcagtgtttatgcaaaagtgctctttttttggtgacgcagaagacagaggtcaagtgtgaggtcatcaccactcctggaggtgtctgtccctttagttctgcacctcactaggagcagatgaaccaggtgcacctgcccctctgacccttccgccctctgagcaaaggtgactgctttcccactggtgctcagcacaggtgtcagtaggaggcccttgaccctggacaactcccagagatggattcctccattcagtctggccttttccctccagcaagtgcttattgattgcctggcctctgtttggccttgggcttgctggcatgaaggacgcagacctctggctcctggaaagcagtggagagaagggatcctctcacctgaaactaaatccaagggagaagcaggaaatcagtggtggggaatgaagatgaggatgaggaggaaggggcacagaggtggtattgagggtttttttttttttgtacttagaaaaattaaaaaccctctgtattataaattcaaaaattatatttaaaaatttatataaggccctaggggggttagtgacttaactaagtgatagaaaaatcaatgactaagacttcagaagcagggagcaggccagctcgacagacctgtctctttttctctgtaggaaagggtctgtctttgccacgtggaggcgacatcctccacccttgtcaagatgctgcggtagcttctgaagagaccctacccagattgtttggctgtggttgaaaattcagctatggttctgtgtgttatgttttgcccatcactgagcacatgcattatttcacatctatctattcatctactcaaggggtggtgtggtgtggtggtataggaaaagagatggtggatttagctctaaaacatccagggttatgccttagttttgtggctccatatttaatcacaaaagtgctcacccttgttccctcatctactgcatggggatgagactgatcagtaacttacctagttcacaaaattgttgtgtgtaatcatgtatatggaagtactatgtggtccataaaacatgaaataagtgctggttaaaaacctgcctaggccgggtgcggtggctcacgcctgtaatcccagcactttgggaggctgaggcaggtggattgcctgaggtcaggagctcaagaccagcctggccaacatggtgaaaccctgtctctaccaaaaatacaaaaaattagctgggcatggtgatgggtgcctgtaatcccagctacttgggaggctgaggcagggagaattgcttgaacccgggagacagaggttgcagtgagctgagatcgtgccattgcactccagcatggacaacagagcgagactccgtctcaaaaaacaaagaaacaaacaaaaacctgcctattacttatcacaagctgctttgttgcctggaaatactatttgtaatcaaaagagggaagggccaggcatggtggctcacgcctgtaatcccagcactttgggaggctgaggcgggtgaatcacctgaggtcaggagtttgagaccagcctgaccaagatggtgaaaccccatctctaaaaatacaaaaattagctgggcctggtggcaggtacctgaaatcccagctactcaagaggctgaggcaggagaattgcttgaacccgggaagtgggttgcagtgagctgagatcatgccattgcactccagcctgggcaacagagcaagactccatctcaaaaaaaaaaaaaaaaaaaagcctgcattttattgcccatgtgtttctaaggggatatgtcttcagacgcttctggggaaaggagtgaaccatagcatagttgttgttcttttggcccatctttgtcatttgattgttttggactcagtgacttttccattctccacaaaaacattcttcagtttattagttactataattacttgtgcacttgctttcaattccacagacatttattgagctcttagaacgtgccaggatgtatgtgagaagatgggggcagggatccaaggatgaatcagatgtgctcctgcctccaaggagcttatggtccagggaggaaacggggaaaggtgccctggtggtggtcgcgaaggctgggtaaggttacagtaggagaatactgcgatagtgactgtttctgatcacctgctctaataattttgttcacgttatttcactcagtacgaccaccctgaatgaaaagtgtgatctctatttcacaggtgaggaagctgaggctcaggttaaatacagggaatctcaccaaggggatactagatgtcaaacttgggccatctgtctggaatctgtgctctttcctctcaactgtgttgcctctcaggccttccagagtgcccaccctacttcccccttcagtccctttccttttttttgactggagtctcattctgttgcccaggctggagtgcagtggcacaaccttggctcactgcaacctccgcttctagggttcaagcgattctcctgcctcagcctcccgagtagctggtattacaggcatgtgccaccaggcccagctaatttttgtatttttagtagagatggggttttgccatgttggtcaggctggtcttgaactcctgacctcaggtgatccacctgccttggcctcccaaagtggtgggattataggcgtgagccaccatgcctgaccttcagttcttttctatgcatctccttgtggcaccaacttccagggaaaccacattcttccagaaaaacacaaaccagatcatctaaatatccaggcagactgttctttcctgccatagggcctttccaggctcttccttctgcctagaatgttcttctctccccacttctccaactcacccttcatggcatggccagttctttcgttcccttcaggtttttcctccttgtcaccttcttacagaggatgaccctaatcctacttcctgaatgttcactgtaactgtcctttcccttcatggcctttgccatgttttttaattataagttgtgtttgcttgtttgttgtctttaaggtacccaagaacagggaccaggattttttcaccaatatatacgcaacctggcatggagttctgagtgagtgtgtgagcttcagtttacacactgggtgcgtgaaatgttacttcataacactggcaaaacagcctgattttatttcaagcccccatcccacagggttagcaggactcactgacttcactttctcccctctctgcatcttggggaccctcctgctttgctgatggggaaggtcaaagggtctgctcctccactccttccccatcttccagccaagacactgtctctcttgctaaccctcttcctctttcttccttcacaaacctcccttggttccctaaagcattgtctctggaagaacaaaaggcagaagggctcgtaggcgatttctgctttctgtcctacccattcgccccaaataacaaaactcgaagcaggttacctgcttgggtaggggcagaagaggagcatgcaaggacatagatctgtatctcaaaattctatgttagccaaatacatcagtaaagacgggagctggaaggtggattctgcaggggtgggagaaacttcagggacattggtgctgtcctgagattggatttatttcaaagttgagtccaaatttaccaagcaacccatgaattatgatgggataaaccaccgcagagtaacaacgatagtaaataataagaatgtcatttattgagcacctattttgtgccaagcattcaactggcattttacatatagcatctctaactccagagtctgagctctttctcaatgccatgttatctcttgtgtaaaaataagatcttactcaccaccaggccagtcagcagcaaatggcactgggtgctctgctgtggggagtggggagatacttttggcaagagtctaagtgaaactggggctagctcaacccataccctgctctattccagaaactctccagcctgccaagttaggttttccaaggcaaagattggtccatgaccaaagagtgtcacaatctaccctggtggggataaaagtcattctggatgtccccaccttcttagagtttgcaattgtcatatttaatatggctcttagaattattgctctggtaaggacaagcttttgcttattttacgtgtgtacatttcaccattttttcacagtgcaagttatttgaggactttttggtatttttgtctcttagatttgtagtagtattgaaactagctaacagtgttgagcacttactataggccagtcacccttttatacaaatgaactcatttcatcctctcaacaaccctgttattattgccattttacagataggcaatctgagacccagagagggcaaataacttgatcaaagtcacacaactgtcaagtggcagaactgtgctatgaactcaggcggcttggctctagaggtctcacatttaactattcccctatacagacgctagtcacaaagatgcagtctccttgaaaagtcgatctgggaagttagtggtctatttcagtttgtgcccatggcatggaaggtctaacagttgtgggagggcatcaagacatggtgggggaggctgggcatggtggctcatgcctgtaatcacagcactctgagaggtcgaaatgggtggatcacttgaggtcaggagctcgagaccagcctggccaacatggtgaaaccccatctctactaaaattgcaaaaattatctgggtgtggtgcccgtctatagtcccagatacttgggaggctgaagcaggagaatcgcttgagcccgggaggcagaggttgcagtgagccaagattgtgccattgcactccagcctgggtgacagagcgagactctgtctcaaaaaaaaaaaaaaaaaaaaaaaagacatggtgcggggaggtactgtggtatgtgatatatgaggataaatataggacataaagccagaagcccttgcatctgcttctggccatgttgcctatgagccttagaccttgggcaagccaattaaacttaccaagcctcatttttctcacttgtcaaatggggttaagatgctctaccacagagggttgttgtgaggaaccaatgagaatatgaatattaaagtggcttgtaagctggaaagcactacctgcatttaaaataatgaagttatcattgttgttatccttaagagcactggatggagatgatggcgaatgacacagtaatcataagacaggcaggggctacccaggcctgttaacaggagggccattccctcacatcctctctgccagctccttgatgttggcatcactaatgtctggtgcctgctcatcccatgacctagacttagagcccattcccctgattctagcagtcaggatgactagttggaaataacagccactttaagctggaagggaatttactaaaaaataatgaggattagagggtattctcgggaggaatagagagcaaggacttaatgaccagctataacatgagaacttctctgccttccatgcctgcagaagtctgagtctcctgtgcacaatgctcacttctaaattcaggtcttgcacaggtgagtctgactggtggaaccgaggtcagtatctgtgccctggctgcaatggttttctggcttctatcttggcaagagaagacttatgagaaatgaccaaaatgtaaaagtgggttttcaaagatctgggtggccacagatgacagatatctgccatactggtctagttcccagcacgctggacccgcagagtgatttcagggaacagaatcagaggaatccacccgagggcttctggcccattcatggggagcccagagaacggtgtgctttgcctccaaatctgggtggtgtggcgggatggctcctgctccttcggacctaagggacaggctgtggtgctgctgcatgtgcagacaagtgtcctatgctgccagcatgcagggtggggacattcctgtgagactggactgtgaggaagggtgtgacagttggctactgctctaagctggcctgtcgctggcttcagcctttgctgtcacctttcctgtcaccatttcagtgtctacaggctgtaagctagaagctgacacatacccagagtggccatcctttgtgcatgcaaggagtgctcttttgtcacagaaatgaagaccccatcgggaacacactgtaggggactgacaattacaggtgcgccgcaggcaggatgtcaaagacgagagcgggcctaatgaaagcatgcgtttatgtctaataggatgagttggtgggtgtcagcatcatcttactccccccagcctggaaagaaagagataaacatgggtgtctaaaggctcttcaaggggagattttactccatcatctcagaggggtggaggagagaggaaggtctgtaagggtagagaacgaagcctcagactctgggtggggtgcgggtctccaactgaaagaatgggggtctggggctaccaaaagttgagggcctgtgctcagcatcctctctggggtggatggaacctcagagggacaagtcctgtgacacccttatggcatcttggtgtgcaggatgtacatggcctggtacaccaggggtccctggttggcaagacccttctcaggctgtctcagtattaaagtaactgctgtctgactttacagactagaggagcggggctgggaacacaatgtcgaggtggattgaagaccagagcccctgtgcaatgccgaccaggaaaggttccaaggctcttgagtgtctctaaggacgtgaaggccctaccaaaacaaaattcaaggtagggacttggaaccacattgcctggctcagaggaataaagaattgggatagctctggtttgctagggctactgtaacacagtatcataaacccagtggcttaaacaatggaaatctactgtcttacagatctggaggctagaagccagacatcgaggtgtctgcagggctaggctctctctgaagggactagggaaggatctgttccaggcctctctcctagctttggtagttccttggcttgtggcagcataactccagtcttcacaaagcgttctctgaatgcacgtctctttgtccaaatttcccccatatatatatatacatatattttttttttttgagatggagtcttgctctgtcacccaggctggagtgcactggcacgatccctgctcactgcaacctctgcctcctgggttcaagcaattctcctgcctcagcctcctgagtagctgggattacaggcgtgtgccaccacgcccagctaattcttagtagagacagggttttaccatgttggccaggctggtctcgaactcctgatctcacgtgatccacccgccttggcctcccaaagtgctgggattacaggtgtgagccaccgcacctggccaatttccccttttcactggaacaccagtcataatggatgagtccacccttatcttaacatctgcaagaacgttattgccaaataagggcacactctgatgtaccaggggttaggacttcaacgtataaattttgggggacactactcaactcccaacagctgggtctcccattctgagttttggggcacagctgtgctctgcctaggcatagctgattcccaccctaggaattcccaccttgggactcaccatgtgagacttaggaggacagttcatctctttcagttaaaaattttgtttgtggcttggagagtcacttcaatacatggataatgatgcccaaacctgtcggcagcctgctttccagctgtgaccatggcaggtaacgagcctccctgagtctccactgtcctctgccgaccaaatgggaatcataacagctcctcttattattatgcctgagacgaggcagccagtctggagagggccaacctagcacaggactgtgagcacacacaagacaatgtgggcgtccaacagatcctagctcccttccccttggaaggctatgcacacagaaaatctttccttgggttgagctgagatctagatgaggccaggggtcagacgcggtgaagtaccaaggtcacagggctgttatggcatcgcactgtgtagaagtccagtttcattgatctcgggataggggccgattggggtccagtggctccttcgaaagaccttttgcccttggaaaatgagatgtgacctcagggatagggggagaagggagaggaaatgtggaaacggagccacacagtcttagagttgcatagaactttggaacacccctattgcaggcccctctcgctacagctggggaagctgaggcgggaggaggggaggtactgtgtcaaggtcaaacgttgggtggtgccaggcgacagaagccaggcctttgagaggcaaggctgtggtagaaatgaaaggggaggtggtgggtgcttccaggggtctgtgagctccgttcccaagactggaggggcctgtgtctgcggagggggtggcttcctgggctctggaggggaggggaggctaaaagcagggttggggagcgaatctgggggattgtgggaatatcgggccgcgccccagcccccagcgatgcgtggggcgcctggagaaggggcgcacgggcaggtggggtgctgcggggcccgcgcgtgggggccgcgccggccggggcggggtgagtcacggcccgcccgctcccattgtgcggcccggcggcggcggcggcggcggcggcggcggcggaggtgcggagcggagcgcgaggaggtggagccgcgggctgcgggctccggcgcctgcgtccgcccggccagcccggctctgcgctgcgagaggccggacggcagtcgcggctgcgctcgggagagagcgcgggggacatggggcgcggcggcccgcctgggcctcgcaggctccggagccccgaggtaccgcggggcggggcacgccgggcagggcgggggacccgggctgtcccgggcgtggctgggcctcggaggggcgcttgggccgggagcgtgcatccggctcccgggtggggggcgccagcgcaaggaacctgaccccgccctcctcccccagggctccccgctaggccccctcagtggcccctccttctcacctgggtctcgggtcccctagtgagcgagagcgtccccagccgcctacctggccatggccaacggagtgatcccgccgcccgggggcgcctcccccctaccccaggtgatcggcgcgcgcgggggcgggggagagatgggggaggagaggggagggaccttagggtgggcagaggagtcctctggccgaccccgggaccccccagatccagggatgagctgggctgggggttacggagaaagaggggggtttttgatattttccagatccgtagccctctctctttacaagctctgggagcccagagagggtggtttctgggatgctgacacaggcctgggagcaaggggagggggcccgatggtgtgagagcctgctgagctcccccaactagggcttggagttggggtgggtgtggggccttcatgggtcaggggtccttagcagaggccgtctgggcctgcaggtccgggtgcccttggaggagccccctctaagtccagacgtggaggaggaggacgatgacttgggcaagaccttggctgtgagcaggtttggggacctcatcagcaagcccccggcctgggaccccgagaagcccagccgcagctacagcgagcgggactttgagtgtgggtagcctggggacccctagtgcggccgccctcgccaccatcaccttcatcgccaccatcaccgcgctcacctccggcttggtcacccagtgccatcctgtgccggacactgtgctggactctgtgctgggccacatgccgtgttcagtcatcctgcctcccccacccatcgcctgtccgcctgcctggggaggtgggccccagaccaggggagatctagggagctgggcctgggcccttccacggtgaccttccccttccccttcgtccccactcactccctccttgtcccacctcggctagtccaactccgcctttcccctccttgctgtatcacgtctcccctcccagcccccttcatgaccttccctgtccatccaccctctcctcccactccaccagacctcatcaatgacaggcacgtggacacaggtgttggggggtcatggccctggaggaaggactagggtgcccttgtttgcggccttgagctggaaggtgtgtgccctcgggtggggagggcccctgtttctgctgtgggggcctcaaccggatctcctgcacccccagttcaccggcacacatcccaccacacccaccacccgctctcagcgcgcctgcctccaccccacaagctgcggcggctgccccccacctctgcccggcacaccaggagaaagaggaagaaggagaaaacctctgctcctccctccgaggggacccctcccatccaggaggaggggggagctggagtggatgaggaagaggaggaagaggaggaagaggaaggagaatctgaggcagaacctgtggagcccccccactcagggaccccacagaaggcaaaggtaggggcttccctttggaggggtggcaggtcaggggtcagggaggggtacagagaggaggagaggagtgcgtgttgggggcctgtgtgaggctgggtagggttgggggctgtatggtaggtcggggcaaggccccagggcacattctatgtctgcagttctccattggaagtgacgaggatgacagtccaggcctccctgggagggctgctgtcaccaagcccctgccctcggtgggcccacacactgacaagagcccccagcactccagcaggtactggctgcagcctctactcagcagggcccagcccagagccacagggtccagagctcctggcagtcacctccttcctgaccctggggagtgtccccagctctgaccctgagaaaagaggagcagggtgtgggaggggggtggggatccttctctgtcctcatgatttacaaggaggagagaacaaggggggggggagaaaaacagagaagagcagagtgaagaggttaggagttccccaggagagagtgacagagtagagagggtgaggagaaaggtggaggaaagggggagccacgggatggggagggggcctgggtcagcatcctttgctgcccaggaggggcctgggtctcatgctcagggtctactccaggccgtgctctgagctgagggacggtgatggaaccaccgacctggccctgtcaagtccaaggctgctgtgttgcctccccagctcccccagcccccgggcccgggcctcccgactcgctggggagaaaagccggccctggagcccatcggccagttatgacctgcgggagcgactgtgcccaggcagtgccctgggcaacccaggtggtccagagcagcaggtgcccacagatgaggcggaggcccagatgctgggttctgcagacctggacgacatgaagagtgagtgagaccttgtggcagcccccatggtccactgcgacggactcccagcctgcgagtgaccttggagaggctctgagctgtcccctgctaagggctgagtcctctctgaatccctgtctgctgggatgtggccagtgatggggacctcactacctcacccagccaccctctctgacggccagagctgagatttcctttcctgacacctcacgcctcagtcctgattctgtcctctgagtcacccctagaaaaaggcagctctctttttcacattactgtatccctccccaaggcccctcttctcggggtgaactctctgtctcctctttgatcccctccaaaccaggccctgagtctgagccattgctccggacccctgcctctccctgtgtcaggacccttcactcccatcccactacccttggggggggcctggctgtgatctcggcacattccttccatcttatcagtgccctggtttctgtgccacctgtcatcacccgtggggctctgtgcccaggccaggggcatcactgatccctccccctcctccgagccacagtgtgtgggtggggtggggggaagggtagggctttgagctcaatacgtcatggaaagttgccagggcctgaggacagggacaggaacaatccgatggcagcagtagcagcaggatggggggtgggggagggcgtgtttacagacccagggtgggggctggatgccgcagggagcaggcttgtggacttggggagttggggtcgggaggctgtgccaccttcagctctggttggacagaagccaccccgtccaggctcccaccttgtaggagagccgaggggtctggtagggagcggaggccgaggtctcggccaccgggagaatgacgagcccactggagaaggaccctgagcccaatggggcactgagccctgggcctggggataccaatagctggggctttgggagggatccagcccccagtcctcgagactcactggccccggaagacttagagatgtttgtgctggactttgaggatggtgacctgtgggagtccatcaggggccagctgggccccatggcagggccaccaacttgtgagtaacggggctgctggcctttccccgactgctgctggcctgggtggggcagacaggaggaagggagcgaagccctgcctgagtctactgggctgtgtaccttcggggaggggacgtgggtgttgagatagggtgcacggaaaatgttgggggctcagtgcctggggactctgactcagtgcctgtcatgggacccagatggagaaggaggggcagtggccatggcaggggctggagggtctggctggggctgtggactgagctgggtctacctttggattgcatcttggccggtggtcccaggtgaccatggggaggtccttccctctttctgagcttcagtcttcttatcaatgaaatggccacatgggattatgtggttcccgtcggcatggcctgttggtgactgtagagctcaccaagtagatgggttgggcagaaggagctgggccgtgaccccgagggccccagctggacctgtgggacccccaagcccatcttctctgcaggtcaccgactggaggacaaccctggtgtgcggcgacacttagtgaaaaagccctcccggacgcagggcgggaggggcagtcccagcggcctggcccccatccttcgcaggaagaagaagaagaaaaagctggaccggaggcctcatgaggtcaggatgctgactgggtgggcctgtggcttcctcatgcccctcggccccggagccctcctctctttgcccccctgccttgccccatcacggtgttccccacacctgttggcccctgggccctcacctttggcacgccccccaggtgttcgtggagctgaacgagctgatgctggaccgcagccaggagccccactggcgggagacggcccgctggatcaagtttgaggaggacgtggaggaggagacggagcgctgggggaagccccatgttgcctcgctctccttccgtagccttctggagctcaggaggaccatcgcccatggtagggacccccaggcctggcccgaggctgcaagccctcttcagtctgtgccaggctgctcagttcccaggaacactctctagagtcctgggcacaggcaagatccaactgccacctgggaccgtgggggtccatttgcctgggcagcccgtgagccccgaggggcagggctgtatctggtgcatgcagtcagtcaacaaatggcttccccttccttggtggggaggggccgtgccctcgtttccatgctccattttcacggcccctctctgactggcctgtggcaatatggagctgtgtatccatctgggtacattgggcgctttgcccttccagcacattcgcatgcttttggggggcaaggcagagtgggaggagatttttcctgtctgatgggactgtgccctctctgtgcctgactgtccccctaggagctgccctcctggacctggagcaaaccaccctgccaggcattgcacacctcgtggtggagaccatgattgtgtctgaccagatccggccggaggacagggccagcgtcctacgtaccctgctactgaagcacaggtgccggggtgggtccctgggaggggcctgtccagctcagctgcccttccaggagcacatcctcttccaagtggctcccagcctctgcttgaatgccacaagtgacagagagctcatttctatcttttgacactttcaatcattataaagtttctttttacactgaggcagagggatggaggtcctgaccctccactactcacctcatgacctcagtctaccatgagcctctcctcctcacctgcctcaccctgccccttccagccatcccaacgatgacaaggacagtggcttctttccccgaaacccatcgagctccagcatgaactcggttctggggaatcatcacccaactcccagccatggccctgatggggcggtgcctaccatggctgatgacctgggggagccagccccactctggccacatgaccctgacgccaaggaggtcagtgcccttgctttggcttgggccaggggactgagagggtgtccagtttcagtcgaggtcatcgacgacttcactgagtgggttgggaaggttggattgctggcatcatgctgggcattcggggacctagaggagacccgcatgaggggtccctgccctgagacgcaggagttttgaatgtgatgatgtggcagacccacaggagctgtttaaacaagataaggctgaggtggtagttggggacatcgaggcagggtccacatcccagctggtggctcccagtgtggggccacagtgcagtacctgcctactctgggagggagaagcaggtctcagagccagggctggagccagggctgggagggcctgccacggcctccggtctgggtcccagccctattccagttctgcgtcctcagaagcccctccacatgcctgggggagatggtcaccgggggaaaagcctgaagctgctggagaagatccctgaagatgctgaggccacggttgtgcttgtgggtgaggagggccgggcgccgggggcagggtctgcagtgtgtgtgtgcctctcctgggggcctgcttgtctgagctctggcctcgaggccgcctcttccatctccctccaggctcccacctggtccctgctcttcctcacaacctgtcttagcccagccctttctttcgtagtcccctgcctgcttcctgtccagttttctgctatcttggagttggaattagaaaaaaaagcaacacttctttaataccctgagtttccatctgttggcgaattgtaatcaatgtgtagacacataagcgaatagtgcccttttagactggggtttctttgcgcagtttacaacctgctcaactgtccatgatagccctagatagctgccccagggcctgccttgactgcttctctttgcccagcgccctgtgctttcctcttcccctaggttgtgtgcctttcttggagcagcctgcagcagccttcgtgcgtctgaatgaggctgtactcctggagtctgtgcttgaggtccctgtcccggtccgcttcctcttcgtgatgctggggcccagccacaccagcactgactatcacgagcttgggcgctccattgccacccttatgtctgacaaggttgggcgcgtgctggctctcaaggcctcttctcctaggccctgcttacccctgtccctcattgtccacagtggtgcccatagaggcaagggtgctagaggcccctgggtggaggccatgccctggagggtggtggggggagctgttggcccaggggagaagagagagccttgggctgtggctgtgggagggtctggtgacataaggggaaaagcccagaccccagagctttggatgtgatgtgagacttgatcaggagggctggatgcgctggtctttgctgtggcttctcctgggattagataggagggtcctttagccaggggcaacgttcacaatatttatcagcctgtaaggtgtagctgatccaattggaatggctctggaagcccctgctctgccaggtgttatccctttagttgctgcatgtggaagtctggcatctcctgggggaatggagggcacctggggctttggggcagtggcttgctggcctgcagggatgggtgtcagtgttccaacagccaacactgttggactggcccagtatctacgactgaatgtccaccctgcctgtagctcagtgacccaacacccgcctcaagtctccctcctggaggctcccttggctgtccctgagggtcctggccctctcattgcccccagctgtttcatgaggctgcctaccaggcagatgaccggcaagacctcctaagtgccatcagcgagttcctggatggcagcattgtgatccccccgtccgaggtggagggccgtgacctgctgcgctccgtggctgctttccagcgagagctgcttaggaagcggcgagagcgtgaacagaccaaagtcgagatgaccacacggggtggctacacggcccctgggaaaggtcagacccttggaggctgagtgcccccaatacacactcccccatcccagggccctaaggctgtgaccccagccccgtcctgactcctggagtcctttgcatccctgatcccaacagcccggggcctccgagccagagggagtggtctgtgccccagcagccccttgttcccccagaactgtctttggagttggggggctctgaagcaacccctgaagatgaccccttgctgcggacgggctcggtatttggggggcttgtgcgggatgtgaggcgccggtacccgcactaccccagtgacctgcgagatgcgctgcactcccagtgtgtggccgctgtgctcttcatctacttcgcagccctcagccctgccatcaccttcggggggctgctgggtaagggactggggcttggggagttgaggggctcctctagtcacttctggtcccagtgtcacttgcaggattctgggtctgggtgtgatcacattagggggccaatggttagatgtgctagcaaaggtgtaagcaccttacagagatgctggatcagggaatcccagcgatcacctttggggagctataaagtgagggtgtgggagaggtgtaagggatgagggatcctgtgatcaccattgggggctagtggggagggtttgggagcaatggggtatggaaggggccctgtgtgtcactctaaggggctgctctgcttttgttgggggccccagtttaggacaagctagatgaagaagggggcagatagacagagccaggctagggccatcctacccgtgctatggcaggagagaagaccgaggggctgatgggcgtgtccgagctgatcgtgtccaccgctgtgctcggcgtcctcttctctctgctgggagctcagccgctgcttgtggttggcttctctgggccgctgcttgtgtttgaggaagccttcttcaaggtgaggcgaagccttgccctgctccatccatcctgccccacactcttccttacctacatcctgccccacactcttccttacctacatcctgccccacactcttccttacctaggggatgggtccctgcattctccctcttcctcggagttcatccgctgcctattccagggggcattgacacccagggcagtccacctgtgggtaacgaccgctcctacccccacctagttctgccgagcccaggacctggagtacctcactggccgggtgtgggttggtctctggctggtggtcttcgtccttgccctggtggccgccgaaggcagcttcctggtccgctacatctcgcctttcacccaggagatctttgcctttctcatctcactcattttcatctacgagaccttctacaagctctacaaggtggaggtccagcgaggtcttgggggtggcagagatggaggtggacattgccctggggaggacagcatgggagggggaggtatggagaactaggggacaaggagagggactgtgttgggagtgaggggttctagggacaccctaggctaggtctgagctgaaggggagggagtcagacccagggggtgggtgccaggtcacgactccaagcacctggttggaggcttagtaataaggactcacttgcacaggtatgtgatggggagggagctgtcagtgctaaggggctgggtgtccttgggtcaccttttgtagaggagtgtgtgtgtgtgtgtgggtgtgggtgtggtgtgagtatggtgtgttgtgtgtgatgtatgtgttgtgtgtgtgtgcgtgtgtgtgcctgtgtgtgcatgttgtgtgtgttgtgtgtatgtatgttgtgtgtgtggtgtgtatgtggtatgttgtgttttttttgtgttgtatgtgttatgtgtgtgttgttacgtgttgtgtgtgttgtatgtgtgtgttctgtgtgttctgtgtgttgtgtgtgtggtgcagctggatgtccgtgcattactgttgtctgaccaggtattgaggggccaccctctctctcacaggtgtactgatgacgatgaagtcaggtcacctgccaggtgagtgacaaggcatccttgttatccacacacaggtgttcacagagcacccactgctgccgttctacccccctgagggggccctggaggggtccctggatgctggtctggagccaaatggcagtgccctgccccccaccgagggcccccccagcccgaggaaccagcccaatacggcactgctctcactcatcctcatgctcgggaccttcttcatagccttcttcctgcgcaagttcaggaacagccgcttcctggggggcaaggtgcgtggctgctgggtgtggagcccccaagagtcccacaattcctgctgtaggagctccccagagaggctgcaccccttccccggtcagcccatggaccaaaacccagctcgggcagcccctcaccccttcggaagcctcttccctgggtgtcttcttgccctttgctcagagaagtctaatcaagacaacagcctcccaggctgcgctggcacctgtggggttgagaggcacgtggggggccttctggctccagcttggacccaggcagggccagagatggcaagccccgtgttagtctgctgaccttgcctccaccttttgctcccttccccaactggcccctctcaaggctcgtcgcatcatcggggactttggcatccccatctccatcctggtgatggtcctggtggattactccatcacagacacctacacgcaggtgagggagccccagcctgtggcagctgctgtcacccccaggccaggagagggagcccacaacacacttccatgggccctgggattgggatcaggcctgaactcaactttcccagtggagtggccgccctgggggctgagggccttccccagggagcctgagtgatgaatccgggagaagcaggtgtggggctgggagcagaatgacagtatcccacacaggtcccctgaagctctggggctcagggaggaggcgcttcatttccctgccctctattggatccttgaaaggacagtgacttctggaggatgcaaaactaattttcccctgacctgttcacaccccagctccctgaagtcctggactggggacgcagcttagtgggctgcttggtgggctttctagcatggggaggctgtgtccctgaaccctgttttcctgccatgcagaagctgacagtgcctacagggctctcagtgacctctcccgataagcgctcgtggttcatcccacccctgggcagtgcccgtcctttcccgccgtggatgatggtggcagccgctgttcccgccctcctcgtcctcatcctgatcttcatggagacacagatcacggcgtgagagagatgggaggaggaggtgggagggacgaggccaagctccttggctccttggcttggtttcagggttatagcagggacatcattatcagtatcagggtgctgggtggtgggagctggtggcaatccttgaggaagagagtgtgtgtggaggagctggcaggggtgaggaggaggtgggggaggagcagagagcagtggcatccggggcaggggcatggtttccccgtgatggtttgacatgacatctatctgttgccaccactctttgcagggtggcacttgacagtgctcagaacactctagcagtctaagcttgcacccagggatgctcacatgtatctaattttggttaaaccacaataacgtggtaagatctggcatctggcttttgtggtgttttaaatattcacagtatgagaatttgtctcacatttgcttcaatgtgagaacttcaatttgggaacttgaaagaagaagctggcagtcctagggagaactgttgtctgcacgtcctccccccaccatctcgtctctgtgtgcgtgcctgtctttgtcccctgcccctgccaggccagccacaccccgctccccaccttctccctgcaggcttatcgtcagccagaaggcgcggaggctgctcaagggctccggtttccacctggacctgctcctcattggctccctgggggggctctgtgggctgtttgggttgccctggctcacggctgccacggtccgctccgtcacccatgtcaatgcgttgacagtgatgcgtactgccatcgcgcctggtgacaagccccagatccaggaggtgcgggagcagcgggtcactggtgtgctcatcgccagcctcgtgggtgagagcccgcctccaccctgcacacccccttccttgggccccacggtcttacatcttcactatcccaggcttgaccctgaatctcccaatgtgctgtgtgttgccctcaatctgacccccaaacctgcttcccagcactcccctagccctttactcctggagtccttttctggctctctgtcctgccccctcttctctctctttttttttgagacggagtctcgctctgtcacccaggctggagtgcagtggcgcgatctcggctcactgcaagctccgcctcccaggttcacccattctcctgcctccgcctcccgagtagctgggactacaggcgcccgccaccacgcccagctaattttttgtatttttagtagagacaggggtttcaccgtgttagccatgatggtcttgatctcctgacctcgtgatccacccacctcggcctcccaaagtgctgggattacaggcgtgagccaatgtgtctgcccccccccccgcccctccttctcttgttcagggtgataaggccaagttgattggtccagtgggtccatgtcgcctccccccaggcctctccatcctcacgggggctgtctgagggtcaggcagatctgtgtcacctcttccaggcctgtccatcctcacgggggctgtctgagggtcaggcgggtctgtgtcacctcctccaggcctgtccatcgtcatgggggctgtgctgcgtcggatcccattggctgtgctctttgggatcttcctgtacatgggggtcacgtccctgtctggtatccagctgtcccagcgtttgttgctcatcctcatgccggcaaaacaccatcctgagcagccctatgtgaccaaggtagggccgggaagcatgggggtagggcagtggggtgacgggaaggggatccagagggatctgggagcattgatggatgggatgaatatgaaggagaagctgtgacctgggagccaaattccccacgatgtgggtgggtgggagcaggccgggacgctgtgcactggggcccactggctgctcccctaggtgaagacgtggcggatgcatctgttcacctgcatccagctgggctgcatcgcactgctctgggtggtcaagtccacggcggcctcactcgcctttcccttcctgctgctgctcacggtgcctctgaggcattgccttctgccccggctcttccaggacagggagctgcaggcggtaagggggtggtggtctggggaaacagtgttagggcaaatgggcactgggttccaatctctgtttggccacccactagttgtgttagttgtgaaacttgtgtaacttgtgttgcaagttatctcaccttccgaaatcttattttcacctgtataataggggtgatcatagaccctaccttataggactgttgggagggtcaagtgctagtccaggtaaaggccttaggatggtggttttgtaagggagttggcacggggctgctgcacacagctgtgcaggtggtgcctgaccaaaaacacccggctgagaggctacagggttgatgtggcactggtgtccaccctgagccctgtttttgtcaactagaggaaaagacatctttttgcaatttatccatactcaaacatggtgtacaaaggtaccatagcaactagaagtggcctcaggaaagagcttcataataataatcattattattatcaccaggaggggccaggtatctggtctgggaggtgacctgaaggctttggccaagggcagtgctgccacccagggtcatggtacttgcagagaggcccaggaaaggtcagggagcagggagggctgcaggttggaggaggagctggagaatgggaggggacgagcatgcttccctgccttccccaaccttctgttccctctgcagctggactcggaagatgctgaaccaaacttcgatgaggatggccaggatgagtacaatgagctgcacatgccagtgtgacccttgaagacagtgcccctcagagaccccaagaccttagggattgacacctgggcctcaggcagagcccagccctgggctggggggctcctcaggacccagagatgtgcctggaaccactcctgatgccatggctagagtggcccccctgacttctgcccggggtgttgacctcgcctcacctttcacagaccagaccggcacaggctttgagctcattataaccacactccttgtctcgtgtctgcctcactttcttggtttcatctttggtttctcaggtcatacttatccatttggaattggaagaattctattttcagggttatcaaaaccagggagaggtttgagtcaaggagagtccttgggagaaaaagagagaatcgagactacagaaggccagagctgggccttatcatcatcccccaggccccctcaagtgcagccgaggagcgggcggtaggggtgggggcactcaagctctgctcaagatcacatgcccatgaatccaacccctgcttagcaagacggaagaaccggggaggggagagggagaaagttgctccattgtagctactggagaaatcagaggctgtggggccacagagggaatggaaaatgtctctcttcttttcttgatctctggccttcccaggagcagagatagcagcccaatcccttagacgccagggtgatgccggatttggggaccctggaccattttagattctgctggcttagagaggcagttctgggattcctgaggccactccttgtgcaacagtctcagttttgccagaaataacctgggggacttgaggggagcgggagcccattgcgtcatagttgctaggcaacccccagcctgaaggagcgcatcgtcccccgttgccctccggtggccgctctcgcatgctgcaggctctgtcccgactgaggaatagcagcactgccacctggtggatccgcggcgctcagagagcccattcaagcgcatccagttcctcccgcggagaccaagcccggtcaggcaagttccgtgttctgcagctctgggcagctcagagcttctgaggctggggatccctcagctccacgttagcggtttcctccggagctggtgctgctgctttcttctctttttccaattttgctccccaatgtgctgaactcctatgaactccagtggggaaggcaccaggctcaagaggtggaagaagagacccagactggcaaacgagacatggggttttactggggcttacatacaggggagagagtccgctggtggtgagcgggggcaggagaaaccacaaccggttgcaaaaagcagtttctatagcatttccacttagcaccttcaccctaacaacctccacctggggatcttcattcaacccagacttgggcctggacctttccctttatgtcccgtgttccacagcctggggcctcagatgtttctcatagacaaggaaggactctccaggttggcgactcctggattccctagcttggaagatacattcaggtgtgcctgccacacagggccattctcaggctgtgcttaagttcctgcggtcaggtgcggttaccatacactcctaggtgttcaggccaacagctggtgccccgaaactggtcaggagagaagggacaggccaccgtgaggctgtttgttgtgttcctaaggaagagaagagccctccagctgccctggattattgtccgggtgtaagtattttattccagtccaccttggctccctgggtctctggtgccatgtggcctctaactacatttagcctctcctttgtatgtgtatgtgaggacaagattccttttcctttagattggccaaggctgggtggaatttcaaaagaactttgccaaggaacaaagtcaaggtcaaacgcaaaacctagaagggacatgtgcagagaagattccaaacagagatgtcaggggcctctcagacaagtttggttgagaggctttgcatatgagaaccctggttccttcctagagtcctgcttctccttgcgggcccggatgcaggaaaggctcccctgtttggtctcggggattcctagaccccacaggaaggaactgcactttttccagcccctgcaaggaaatgtctgtgtgggcccagaaggtggattcctcattgggcacagttggtgtcagtcatctcgcggcttggcaaatagccgggaactgtgggtgttcctccacggcaaaatgaaaagaggggcggggccttctgacaaggggaatgagtcctggtcccggttggtgggtcagggtggactccagcaaagctaggccttgaggcctcagagcagtaggcgaaaaagcttcagtgacagccagtgataaccgcttgtcaccctggcagccttactcatttaaagacgacccatctatggcaagggagggcggccgtagtttaggaagggcaggaggcgagggttagctaacattctgagctcacccaacacacccagcacactcagggggaccatggagggttgagaagacccaggacgctgcagcaaccaaaatggctgccagggatggagacccagagggataggagaggaaagagagacccagcttggctgtgtgacacaggggatgagctccattgtagctactggagaaatcagaggctgtggggccacagagggaatggaaaacgtctctcttcttttcttgatctctggccttccgaggagcagagatagcagcccaatcccttagacgccagggtgatgccggatttggggaccctggaccattttagattctgctggcttagagaggcagttctgggattcccgaggccactccttgtgcaacagtctcagttttgccagaaataacctggcggacaagatacacggcaaacccacagaaaggcaaccgggactggcctggggcctggctggccagagagcgtgtcatatggggacattcagagtttgtcctgaagccctttgtagccccggtgtttcctctgactttctctttaccgggcctctgagcttctcctctcggagtgctggggccctcaactcaggccctcttcaaggtgcagaggagagttagtggaggggagccccagccggccctgatggcccagctctggggggtaggacaggacagttactaaaaaggggacaaaggccattgtattttcgaacatccggcctctctgccatctgctctggactggaagcggctttgggaacgtgcacgtgcaccagcccttcagtaaggacatccggcctgtcgctatttcccccgccccttactgctttccgagtggggttatggccacatcttgggtagctgcccaaagctttcattatccccggacaagtgcaggcccacttcaggccctgaggagtgctagctcattcttttactttgggcaaagagggcggctgtcactttcttgttcatgctgaggattcggctcactcaagatatctgatgcccttgtgacagcgtctggctgtcagagctcatagaccatctgctgggactgccctaggcccctcctttagggcacagaacgtggcaataatgtgtcccatttggcagcctgtgtgacatttcttcttgtatcttatcaggtgactcaaataatgatcatgcctgttgacacttggagctctcaaagggaattctgagcagcaaaggaaaggtgacacagaactcaagggcactggcgctgagcgctgcccatgcagctggcaattaagccattgccgaaaacaacaataaaacagattttgggcaagtagggaatggtggattgaatccagtgtggcaaaaaaggaaatgcaaagtgaggaatgtagtttccagataaataaattatataattgtgattcaccacttgtgcaaagagcagactccagtgtttgtaggatttatgttctggaaggaagatttaatatttgagcctactgctgagattatttttaattttgttggaactgtttctttttactgaacaatgctttattaagtgctgactaagcggacagccactgggttgttctctggatggtggatgagtcacagttgggtttgggagatgaggggaggagcagggagctctttaatgccagcaattccagggacaaggcttaggaccatgggagaggagggacaaagagggggtggggcacagctggagatgaggaaggggctgggagcaagggctcagagctggtgggaaggtgggggtgaggggagcgtggaggagggtgcaaaaccagactttcattcgtgagtccctgagcatcccctgccacgcctcctctctcactgcacgcccattgcgtgttcttgtctgtctccctataggctgtgagatgggcagagacctggcctgagtcacctttgtactcgtaatgcctcccacagtgcctggccacaggggtgcatggagggtaagggggtgagcagttggcagagaaagaaggaccaagaggtcacagtctccaccacatttagatccagtgagcagtgcgtccttgtctgtgacaactggttatcataagagagaccatagcggtccttgcgctctagggccaccagggagctcatgcagcttttctaggcttgggagagagaaggtgggttgggggagcttaggaaggacacactctcaggaagtggtgtctcttccagggacatccagcctagactataaggtccggagcagctggtcaggatatcaggctcttgagataggtggatttgttctacgaatgtggcccacacagcaaacaatattttaaacttaatttttaaaattatttttacttcaataggttttggggaacaggtggtgtttggttacatggataacttcttgagaggtgattcctgagcttttggtgcacccatcacccgagccgtatacactgtacccaatcagcaaacaacattttaaaataactaagttgtgtcaacaaatataaagcagcaagtcctcaaaactactgaaaagagcccagaagtggggaacatttctctgagatcagaggagtccttaggcaatatttccccaagtggggaaggataccagtagtggtgtgtgagatgattttaggtgtggttttgatagtttagctgtcacagttatatattttcatgtgttttagaaaaaaatacaatgagtacttgagccccataattttgcagacagtattgtgtaggataagtctaaatacatatgttaaaactagtgaattgatttaaaggaaaagtactaactttataactgtacagttagtaggcatatgatatggtttggatctgtgttcctgcccaaatctcatgttgaactgcaatccccagtgttggaggtggggcctagtgagaggtgattggatgatgaggacagattcccccttggtgcttttgtgatagtgagtgaggtttcatgagatctggtcatttaaaagtgtgtcgcacctcccccctctctctcttacccctgctctggccatctaagacatgtctgcttctccttcaccttctgctatgattgtaagtttcctgaggtctccccagaagcagagccactgtgtttcctgtacaacctgcagaaccacgagccaattaaacctcttttctttataaattacccagttccaggaatttcttttttttcttttcttttctttctttcttttttttttttcaagacagagtctcactctgtcacccaggctggagtgcagtggtgccatcttggctcactgcaacctctacctcccgggttcaagcaattctcatgtctcagcctccagagtagctgggattacaggtgtgcgccaccatgccgggctaatttttgtatttttagtagagatggggttttgccatgttggccagactggtttcgaactcctgacctcaagtgatccacccaccttggcctcccaaagtgctaggattacaggcgtgagccactgcacctggccccagtttcaggtatttctttatagcagtgcaagaatggactaatacagcatacacagcaagaaattgtgacaatgccagggaaaggactaaaatgtcagaaatcattgcttcaagtcggaggatcttagctctggttaagcgctggaatcacctggagtgtttcaaaacatatcagtgtctgagcctcatctctacaggttcacactggcattaaattacattaattaatttttattttttgtagaaatagggtctcactatgttgtccaggctggtcttgaactgagctcaactgattctccagccttggcctcccaaagtgcagggattacaggtgtgagccaccatgtcaggctcacactggtattttattaaacattcccctcccccgacatcccctcaaaaccccagagattctaatatggagtcaggtttaagaaccattgtcctaaaccaatatattctttcctatggttgatttccactacaatttccactgtggttgaaagttatttcttattattgcttctccttggtatgaaaatgcaaatacacagtatgcatatttattttagaaagtaagcttgagggcaggacccatgcctatttctattctgtttatcaagcaacagaaagggctgcacataaacgcatggacttaggaaggggaacaatacacatcagggcctgttgggttggtggtgggtgaggggagggagagcatcaggacaaatagctaatgcattaggtgatgggttgataggtgcagcagactaccatgacacacgtatacctatataacaaacctgcatgttctgcacatgtattctgaaacttaaagttaaaaaaaaaaaaaaagaaagggctgaacgtagcacgttctaatgtttaggctgcttggttgggactgtgatctgtgagcacctctcttgctctgctggctttgctgttgttgatggcattacagttgagtggccagaacatggggactggcagtcaggaatcctcggctttggcctcacctcaggcactagctggactttggttaagtggcctcatctttctgagagattaggaatttggctccagcacctccttcatagaccatattctttcaacagaccctgatcactgcagtggttttgctcaggaagcagggggttcaggaggggggaagcagtggctgtagtgctataggaatccccaaataatctctcagcagagttactaggcttaggaactttcttctttagtttcgccacgtcaaaaggtgtgtagatcctgggggagtccatttttgcattcctaggggagtcagaaactcagagaccacagagggtgggatgggtagggtgagggggtgggggtgagcagtgacttggagaatgatctcaggatattggacaaagctgtgacgtcactagaattcaattaggtgacgtttaaacatctataagaggtgtgtggtcctatgagataagaagcacatgaaaaggatgcaggattctgtagagatagatggacaaatatgtagttataagccttaatggtcacataaatacacaatcaggtatagaacctggatagggagttatggactacactctggcttgacctttagtaactgatcacttgtaatcaagggactagtctactcagccacctccatctttaagttagaaagttaaaaactggaaatagggctctacaggtccatagagtcagcagctaagatgcagtcggcatcccacccagaatctctggttgattagcaacctcaggtggctgagaagggaatacctctcttgtggatagacattttactagccctgggaaaatttattttcatctcgtttaatttttttagccctgggaaaatttaaaattaagcacacaaatgtttaggggaatcaaaactatagttttcatgttttcaagttaaagaatttgtgcatatataatatttgtgtaggcataattttagagaattcggcctactggaatattagaccaccttcaatatttcattttaatgtatgtacttgaataattgattgaaatttgtgataagttgaaatatttccaagtttacatatagtttggacattgaagagaatttaaggttcactctgtcttgtatgctgaatttattaaatctgtaagaattacttttgtacttgggaagttttatcagtcagatgaaatacttaaaaaggaattgaatttattaaatttattaagtgccatttaaaatgttaaagacttttaattaactaagtgtgtaaatggggctaagcattaatcaaaaccctctcaaagtgattgttaatatttgctagacttataaataggacaataagattcctaaggtgattttaaaagcgttaaggaagagctataaatttctaaatctataaatttaataaattgaatactgattttcaaaaccccagtaaatctcagagtggtcttttcagtgcgcaaaagccaccctcaaggacataagacataaaatattttcctaaccagtgagtcttcagcagtgcagggggagagaacggaagtgggaaagggagaaaggaaagtaagattttagtgtcattggattgtcttgttcccaaggtcaggctagatggtatattctgcaccatgccaaattgctcatctcacaggagactgtaattaaacacacgcttactgtgcgggggatcagaattgctgaggagggtatttggcaactaagaaagcaggttaaatcgtgatggctttggggtcttagcagtccctctcagtaagcccttctaagttacattctactgttctgtttgctgttaattattcctcagataatttcccctgagcaagaataaggacattctgtggtagaggctgaggtttttgtttcccagggggtttgctgctgagagccagtgggaatgtgtatcagtcaaaattcttatttgcaccaaacagaagccagctccagctaatttaagcagaaacagggctgttgaaaagccattcacagacactgggaaggtaggagactccaactcagaaccatggtcacagacatgccacagaaaacatccggtggcaatgtggctgttgctgtggaacgtgagatgccacagttgcgcccctggtgggggatatcacccctggaacggccaccaggaggattctgcactgcccctcttctctgcatccatcactaatacctgcatccatcacaaggtctcaggtggatgttcctgactggcttatgtcatgtgcctgtgtcgaagttgctagaaggctgggaaagaggcttttggcatttcagcttctgtggtgggaggcagctctggctctgacactcagtagtgatgtgttggagctagcttacaagagctgcttgtaaaaatttcagggacttgtgaactggttgttaaacatagtcattattaaaaagtaaattatagtagatatactgtttctattcctcttgcaaagtataaaagaaatataagtctctgaatggaggcaagaagaaggcagaccagctagggaccttgggacccaaggaataatacattactgagttccttgtattttctttttgtgtcatatatcccagacttggagctgaagaagctggcaatgcagaaatgccaataggtgtaggcaaaaaagccccaaccaaagtctgctctctctagtcaaaggggtaggaaagaagaaacagagcaagacagaaaactttcagacagtaacagccaaatgcagcagaaaaatctgtgatctccccatcccaactcaggctaacaaaggctaaattggcagcttatacttccaaccttgagaaactgtcaaggcacctcagtactcacgatgaagtgatgtcataggagaccaagtagagcctggacttccagccccatctagcagtaataaggcactcttcctccttcccactgtgttgggagcaagccccccaaaatctggccataaactggtcccaaaactggccataaataaaatctctgcagcactgtagcatgtccataatggccctaacgcccaagctggaaggttctgggtttacgtgaatgagggcaaggaatacctggcccgcctagggcggaaaaccgcttaaaggcattcctaagccacaaacaaaagcatgagccatctgtgtcttaaggtgtgttcctgctgaaattaattcggcccatcccttcatttcccataagggata

SEQ ID NO: 420 - DNA, 34631 bp, Homo sapiens
tgagacacagcctcactctgtcgcccaggctggagtgcagtggtgtgatgtcaaagcaaccttcgcctcccaggtttaggatattctggtgcctcagcatcccaactggctggcccatatttgtgtttttggtagagatggggtttcaccatgttagccaggctggtctgagctcctgaccgcacccggcccttcccacccttaaatacattcttaaaccaggcattttgttccctagagatgtaacttgcatatcaagttttgggaaagttctttggactgaaaccaagccaggattttatgatgaaccagtcatgagctcatttaaggtagaaggccagaactttataccagtagcacatgatccagcataaaggcagtcttgaaatactgcattatccagggacagggcttcagcagctgatctgtcacacaccaggtgtcccacgtaggaatttcttaaaccacaggtaggatgtagctgcagagagtccatacctaggggttgaaagcaagccagcattagcaggctgctaggctgaaggggaggaagccagagggccgctggggactcaccaggtcacgatgtactgcagatgctcgttcctcagagtaactctggtttgccctccaatgggtcctccagggactgtgctctctgtggagacagcagactcaagtccaccccctactggcctgccagcctctgcaccacttcctagtggctgtcatttttgcgtggccagttggaagtcctgtatggcctttacgttgggtgaccatccccgcccttgtccgctcagtacttgcctaggttctttgctgagttgctgcctcctcccacccgccatatacacatgtgagaacataagccacagtagtgactgggcaatgagggttaggaggaaggacagtattcacaaaagctacttgttccgagatgggctggtccacaacgtacggaagttggcatcaatgaagatgggctctgcgcctgtgattctggccatagcttccaggtctcgataatgccagtggttcctttctggattgttctcagggacaaaaggctgcctggtttctgtcagcctcaccatcccaatgaggtccacttctccctcaatctataaaggaaggtgtgtgagattgcatggagcctggtggactcccagagccttctctaaagtaggaagagtccatgtcccttacctggcctttctgccgggtttcaggattcactttcttcctgggaacgaaccctctatttaccaggatggtgactctagggtaatgaaagtgctacttcaggtggggagggtttttgactaaagacagtcactcatggtcactcaggcacccataggaacaactagagcaccaaggaaggcttttaaaacagggctggctcagtggagccctggcagtgccacacaggcaaagtcttcctctcttgaggcaccttcgtggttggtaaaaggctccctgccaccatcactacctttttaccagtgtggctttccccttctatctctgcttcttgtggtctacctactacaacgtgcaactggtgagcaacgctgccacgccagagtttagaccccacacctctcccctgaactatggcaagagctgtctccaatccctcctcctaaccaaggcagccgtgaggagcagccctggcaccccagcctgctggagatgagtacttgggccccatcccagccctaaaacaggaacccatgggttaacaagagccccaggtattttcatttttacgtgaatcctccagttccctagttaatcacacaggtgctcctgtacctgtcatttgctttgcctggaatgttcttcccatctcttaactcccaaatagccctctagggagccacccctgcctccactccctcaaggtagggctggggtcctttctcttgaagtcctcttgctggcccctcatagcttgccatcatctaatgtgtgggcaactagacagttctccagaggcagggcccctgtttcacgaatccctcctttcccttcagaggtcaacatacagaaattatccagtcataaatgagctggctgagaagattaagtcaatgtcacaattagggacttaaactatgcaaggaattgaatctcctgggtatcttgggttccccagggtcctaccaaggttggggattgtgaaggaaatagtgatgtaaattagtataccctgactgcctctgccaggacagccagctcccacatgtcctactcaccccaggtcggtgcagtggaagggagtgaccacataggccccactctgagttgaggaggagatgaggccgccctcccgggcctcccggacagggtccaccatggtccggggcatcatatacagctccttggaatggtcaaagcaccccctgaccttcactggcctatactccagatttttcagttccattgggctgcatggagataagaacagtggccgagcaaggtttggctggaaaacgaatcccctgagggtggcagactacacagcccaccagggccagacaagtgaaggagaaaggcaaagggcgtgctcttcaaaggggaactttgatgccatgtgggaatgtggatctgcactgccagagtccaactttacaagagaggctaaaaatctggactcctcaatgaatattttatgtgaaattttaaaaaatatgtgggccaaaaccccatctgcaagccaaatctggcatactgtttgctaccctgaatggaaaatgtggctgaatatacctatctctgtagggcatattctagggagagagcagacaaatcattcagggcactttttcaaacgaccaccctcacggtgagacctacattatctgccctcagccacagggccttgggccctgtggaggataagtttactatacctgaaaaaagggtgacacccaggactcaaaataagactttcctccatatgtcaggaggcggtctcaggtagcttcacaagggcagtcaggtgtcaacagcaagcccaacagatgactgataatgagagctcccacctgaggtcaaggcagtgactaaaagtcccaccaaaaggggcaagctggccagcagaagccagggctctgctgttgaactcaagtaaaacaggccctaggggggcagccatgcactcactcggctggcagagggacaggctcagccagaactctggactccaactctgcaatcaggttcagcttccacttccgacgctggacctacagtgacagagcataaggccaagcagatggcagcaaggtcaagggcccagagttacgcacaccagatgccggtctttacctgccatgtccccaagccaaaggcagtcacagggatgaggagcaggacccactgaagaaaggagtcatcttccgcttttgtggcagatgcttctgctgcagaactgccacatctgcttggcctccaggccacccctggagagtttcacaacactgacatggagccagaagccctcgaacacagacctggagcagcccgttccaagacagactccagtactgccaatcaaaacctgctgcctagagccaactagcagcacctgtatccagcccagctcctaacccggtgcccagaacaaggcacacacagtacgtctgccaagtgagtaagtgggatctagggctcagtgccggtttgaccaccaaccacgaccctgagtaactcatgcctttttactcaagaatctagatgtattccactgcactaagatgcaccattcatccattcaaaatgcatttaataagcagctacagttggccgggcacggtggctcacgcctgtaatcccagcactttgggaggccaaggcgggcggatcacgagatcaggagttcgagaccagcctgaccaacatgcagaaaccccatctctacaaaaaaatgcaaaaattagctgagcacgatggtgcttctgtaatcccagctactcgggaggctgaggcaggagaatcgcttgaacctgggaggaggtggttgctgtaagccgagattgcgccactgcactccagcctgggcaacaagagcgaaactgtctcaaaaaataaaaaataagcagctacagttactaagtagcttagtcaggcactagtggttattgtgttatgtagaaaaatatatcaattcagtaatggctcacagagctctcttaacagctttccatttttacaactcatcgtaaatgtaaagagggaagaatgtacacagaaagtgcctttaagctctcagaggatgagttccatccgctgaaaagcaccaggggccttgcggatactatttttttttttttttttataaaaaggcaggcctggggcaggcttgcacagcactctacacacggcaaaacagccctgtgctgcacactgagaggaacacgtaagccgcggtggttagatacgctttactttcagagccctgggctttcagcctgggctggccacccattagctggatgggacgttcggaagtaactctcgagccttctctgtaacaggggaacgaccaaggagctacctctcgcgttgtgaggacaaagcgctcgctacatgcccggcacacgaccacaattccactgaaagcattttaatacggaacttgtcactcccagggagcctccgctcagccggcagttggttcatttcaatccccacgacaacccttcaaagtgcagggcagacagcaggtggctctgcccaggcgcctggatcacagcccggcctgcagccctcacctgggcgcggggagaccctgaggacgctcctccaggcggcgctggccggggcctgcggacacggacgggcgggctgagctccgggacccctccccgcgccccgcaccccgcaccccgcaccccgcaccccgcaccccgcacccggcgctcacccgtcccagccccgccgcccgcagccccagctgcaacgcagccaccgccgccatcgcacccggccccgcgggcgcttccgggacgcaggaggcatctgcatccggggcgccgctgagtcccgcccagagccccgcccccggctccaggttctgcgagcggcttccgccgggctgctccgcgggcgcgtcggccatgagcgagttgccgggcgacgtgcgggcgtttctgcgggagcacccgagcctgcggctccagacggacgcccgcaaggttcgcagcgcgggaggggaacggagtggcggagaagggcgcagttgggatgaggggctgaggggagggcaggggagaggagagggcaggggagaggggagaggggagagcaggagagaggggagggcaggggagagggcgcggcgggatcaggggaggagagggaagggggcgcggcaggagggggcaccagggagcggagccctggccctcctgacgtcctgcccgcccacgcgtccgcaggtgaggtgcatcctgacaggtcacgagctgccctgccgcctgccggagctccaggtctacacccgcggcaaaaagtaccagcggctggtccgcgcctccccggccttcgactatgcagagttcgagccgcacatcgtgcccagcaccaagaacccgtaggtggtccgcggcggcgcggggaggcccagggcaattaggacagcccctccgctggactccgccagtgctgcagcccctactctttcagagttgggagccctgggacccaggtgggcgcccgggtgctggaatcacctgcggtcccagcggcgaggcctcttggtgagctcgtttgctcacctgaggtttgtcctgtggggtgtggctgcttcccagatgagtagaggcttgtgatttgtcacctgaggttgtgaacagcgttgggttcttcccttaaccccagaaggggtctttgatttagctgggagctaggctttgtaataatcgtcaaaacagagataggatgtttccattcattgagcccttgctccaggtggagccatcctcttgcatgaactcatcctggagcagtcagtgaggctgccatgcgtgcttttccggtaaacattaagaggctgcagtcggcctgggtcagacggttccccacccagcttcagagtggaattgctccgggagcctttaaaagcccgatgtccaagccgcatggtagactgtccagggatgagtccaagacacagccaccagtctgaatccttgctgtgaactgtccctacaaatttggtctctctgctctgtaggcaccagttgttctgcaaactcaccctgcggcacatcaacaagtgcccagaacacgtgctgaggcacacccagggccggcggtaccagcgagctctgtgtaaatgtaagtcccagtggacccccatcagtgcatcgccatctgagtgcatgcccgccttgccccagatggagcgtgcttgaaggcaggtcgtccttcagcgatccgtgttgatgcatcaggcctgttttttggcacagtgaagagagggatgatggcccctgaccccacagcttttagtgcaggcaggcacagagccagaagcaggctcgggagtgagtgagtgtgcgtggcaatgcgaggtgtgaaagaaactgggcgagggatgtggggtgggcttgcggagacaggagggctggggagactcgctgagggattcgctcgaggctgaggctggagggatgtggtggcagtggggtcgggggaacagcaccccagggagaagccagggtccatggaagtctgaggcaaaaatgtgttggctgaggtaggctccaaaggactggctgggctagtgtgcacagcccggatgacccagagaccaggccaggagcactgcagtgggtgtgtggagagggttgggtgggggctgcatggacagtgtgcatggttgagaagggaggactccttgactgcggtcatccaggaaaagacggtgggttttggggggagaattcagagtccctttgaaggttttaagcttgagctgtattaggaaaggtgtgtattagggaagtatcgggcttttgaaacagggacacccgtgctggatgaaggagatggttgcaccgtggatctgggtgagcacccggcgagagtttagagaagggagagaggcctggtcctgagccccaggaagaggctggaagtcctcccgtggtactgaagggaagatgaggacagaaaaatgatagatttgataacacagaggcccctggcaaccttggtgaggcacctgaagcttggcagggacacctggctagagtggagcgtaggctgcagcccatgagggcagtgtccggccttaggcaggtgctgggtcaccagaaagcctttctggagtccagctaaggagggaaatggacagaggctggagcggacagattcaggttggtttgcggatgggaagatgcgtctacgggcttctgatgagtgcggagaggcagtccagccctcccgaagcatgagtgtggattgagaaggcaggaccagggtttctcaagtagaaggcgggcaccttgcagaggccttgcaggcacaagggctgccagcctgaggcttggactttttccagccagtgtgttagctgctcaggggtgggcaggaaggctctaagtgcagggggccacggggttcccatgaagaatggttatgatggtggactgtggagctgagatgggactggggcgccgaggtcactgcaaggcagtggtccagggaagtccaaacgtggctgtaagggggctctgccttcacgttctggtggtgacaaggctgctgcatggccatgggggtgggtggcagagacaaggagggaaacagccctggagatgggccgccacatcaatggccagggcccagcagggctcatgcagcccatgagggatgatgatggtagctgcgctgggctggagggcaagccccagcagaccctccaatatacaaggggacaacggtggtgactccagtgaggtctttccatggaagccttgtcccaactcccttctcacccactaaggggcagcaaaggccaggcagccaacctccactgagccccgccctccgggacggggtctcccatgtgctgagggaggacttcaggctgctggggagagggtggcatcactgccagcccgagttgcctttgagaggccatgccaagctcactggggcacagttggccttgggcctggtcagtgccctcctagccgtggcttcctaggcctggctagatcggggatgagtggtaaaggccccgtagacctctaccatcttcttgcctcctggctgcagccctggcccaccaccctccctgcacacctggtaggaacagagctgaggcacccagcagctgctctggtttttgtccagggcggtggggctgtggggccctggccgagtgcagtcctcataagttagctgtggcccagaggaccgtggggggtgtggaggtacccagcacgtgctggcttatctcccagatgaagaatgtcagaagcaaggggtggagtacgtgcctgcctgcctggtgcaccggaggaggaggagggaggaccagatggacggtgacgggcctcgcccgcgggaagccttctgggagcccacatccagtgatgaggggggagctgcaagtgatgacagcatgacagacctgtacccacgtaagcagaacgggccctgcttctccctgaccctctactgtcagcagggagcagactgtggtgctgcctcccctgcaaaggtggcagcgaactcagcctaaaataactgtcagccaatccctgtgttcctcccagctgagctattcaccagaaaggaccttggaagcacggaggatggggatggcactgatgactttttgacagacaaagaggatgagaaggcaaagcccccaagagagaaggccactgatgagagcaggagagagacgaccgtgtaccgagggctggtccagaagcgcgggaaggtgagctgtcacctcctctgttagtgtggcagtggcttcccctagtgatggttttccatttgtttaaaaaaagaaaactgaacctttttcacaagtgaaatcccaagccaacaacacacaagaaccatagaagccgaggccgctggctggcggaaggccgtgagtgcctaccattgcttcccagccagccccttgtggaagccaggctctgtggaccacggtcaagaccactggtttgtgaggacaccctcctacctcagactatgagctgtggtgtgtttgtccttacccctgggcacagggacctgattactagccaccacctttgcctttgccatcagggcaggagtggagacttccccgcctttggtagataagcaggaccaaggccaaaagaggacaaggtcctaatgagtgtgtggcattgcactgtactcctctgaggccctgctgagcggggtctaatcctgcagctgttaaggaaacgggggtggagaaagcctctgtgggtatttgaccgacacctctgaggctgtgtgggtggggagagccctgcactccagggccccttctccatgggatcagaaaggctcagtaatcagaattttgtttatcccacagaagcagttgggctcgttgaaaaagaagttcaagagtcatcaccgcaaacccaagagcttcagctcctgtaaacagccaggttaataaaagcacatgccgtgaagtttcgagaaagccttcagatatttcccccgctcctgatcaaaccgtgtgtcctctgaatgatcggctgtccccagtgtcttctctacccacttatccttgtctcatgacatctgctgccctctaaggcagggctgagggagtctgtcccccacacccaggaagcagcagggactctgagggactaattctctctggacatggcttctgagtggtcttcagagaagcctagagaagtaacctcgctcactggcatcctgaggggagccccattcaggctgggcaacgctataggatcacactgcatacaacaaacgccattatttattttgatgtgtttccaaaaatcaaaacgttttcaaacacaactaagatataaaatacagcataaaatgagatttagatctgtttcccacataaagcaaaaaaatcttagaaattgttttgccagaatcaattggtagatcccacttatcctcccctccctgcaaaggcatcttcccgaatcaggccctagcccacccagggccaggagaaacaggaacacccactaggacggaggcgctgctggtgcagaactggtgctgactgctcacgtggcctcctttggtccaccctactttccaccaatcagccaaccaaccttgaccacagagaaaccgtgacttggccaaggtcatttgatgggggctgtcatacggcactaacagggagcgaggtgtggaccaagagacagccctggtgaggttgaaacactgagacaagccagtcttcatgcagtgagcacttgaatgatcacaggagaagagaacccatgtcctgaagccattgctcgatcttaccaatattcgggggtaaggaagtaggctaccaggggaatatttgcaaacgcgttgggactagttcggctgtgttaaaaaggtaggtgacttccaaaagcacttatgagcagaaacctgcctcacccctgccctgcagagccaatggatgagaggccaagagggaggcaggctcggggctgggccgcagcagccctggagacaggctgagccagcctgtccccagataggtctaggggccagagaggtgttcgactacccttgtggcatttactatggtgcagacgacagggagcaacaagcagttaagctcccccaaaaagagaaacacagtataaggcagtgttagaaaactttaaatacaggattaagatcaaatcggtaaggcatcacaaattgtaaaaaggaattttggctgcattcggcatagcaaacggacaatctgagtgagcgacagcctcaggaaagtggtgtgtcggggctgtccacagggcgagtgcagctgggaaagggcggtgctgctcagccagggcggcctgcgctttcgagaccttgctcagaaaaggccccatgtgaggtaactgggttgagtccgtgggtctccagtgctgggagctcctgccacaccccctgcccacagcggctgcggctctgcaagctggtctgagcagctggccaggctggcttgcagggtgctgctgctggggctacccctgtgtggtctcactagcccttcccactgccagcttggaggccagcagcacccagaccagcagcttccccaaggacttcttgcccctccaccttgcctcaagctactaaaactcccagggtgttacccaataaaacacttggcaccaatccaagctgattttctgaccgatgacttttatcataaacagcagcttctaccacccctttaatactgcatcattctttgggtgtccctaaatgttttcactattcctataaaatacaatgcggggcagaaacaacatcaaagccactggtgtgattttaaaccagggagattaactgttttgaggtttggctgaaccacccaaaataatttagtagtttccgctaaaaatgtaaacttacaaataagagggagactgctttgaatgataataccaatgcgtctgctcacagtacagcttgaaggccccctcctgtacccccacaaaaaaactcaaaaataggactgagatgccacagccaagcgggctgttcactccaaagcctcggcgtgggggaggcttccagctgccaggctggcctgcactgaagggtcagacgccagactgtggctccagagcagactgagccatcgattctcaggtgtctctgcaaataaagttctcaaaacatctgtgcctttaccaagggaggggaagggaagaggatacataaaagctggcagttttgttgaatccaccccgaaccagtccttgacggccacgggtcttagccaggcaggtagggatctgtgactgttaccactccttcttcttctcatccatggagacacccccagggcccagggccaccaccaggagcaagcccccaatcaccgacatggtctggaagaagtcgtatttcaggaagtcatgcatgggcttgtagactggaatggtccagaaggcgttgaaatatacgttgatggcaaagagccacacaacaagagtcaaagcagccagcttggttttaaaaccaatggccactaaaatcatcagagctgtgcccacgatgttctggacaatctgcataggttgaaacgtaagaaattcaaaataaatgtgaggaaaagagatgctttataaacaaaagttccagctgctgcacgtcatgaagtctctatccatcaggctgatgtagctactgctgagacggctgctggtgcaagtagggagataaaagccaaagggaggcaggaggcaataaagcaccagctttgaaatgtggaaggtttggggaagactgaagttcccaactagtaacaggctgtgatttaccaagatgaatctctaatccataactaaattcccaagtgcttcttggcccacccagccatccaggccagaaacatcctctctcctctctccatggcgccaggagctcttcctggacactacccggccagggctctcagtcagctccggaggtgtgctctggaagctcctggaggcctgcccctgacacctgacacacaggaattacttgagaaagatacgaacagtgaggaaagaaagaagagtaaggggagcccgggtggagagccttggccaaccaagggccaagcacactccaccaaggtcagaggttctggccttcatttgctggaaagaaggcttgacacacaagagattgacgatgttttggtctgttttaatgggatcaaaaagtttgctccgccgagcacggtggctcacgcctgtaatcccagcaatttgggaggctgagacaggcagatcacgaggggtcaggagatcgagaccatcctggctaacacggtgaaaccctgtctctactaaaaatacaaaaaattagccaggcgtgttggcaggcgcctgtagtcccagctgctcgggaggctgaggcaggagaatggcgtgaacccgggaggcggaacttgcggtgagccgagatcacgcactgcactccagcctgggggacagagcgagactccgtctcaaaaaaaaaaaaaaaaaagtttgctccatttcagcagctcccccaggctgtggttaatacccaaccagggaggggtgagcagggagggggtgggggagggacagcattcacaggaaaccagaccggttcaggcaagtaggaatacttacagaaaagaagctggcgtcaaagtgaaggagggtcatgaacatcagaaccagcaagaccctgcctccgagctgcatgtactgtttgggggagctctcacgcatggtggggacgcccgcaaacatgctcttcccttcagaacgggattctgctaggagcagcaacaggcctcctcccagggccaggttcctgaggaacagatatgtgggctggaagctaagcctcaccaggatctggcctgtctgtgagaccaggtgcagggagaccttgctgccagtataagaaggcccttacttccctttctccaaacccagtgatctgccaagcaggaccaggcaggcatgcgcacaggacctcagactcgagttacacccatgtaaaaccttacatagctcaggagacagaggtatctttacaactcgacagtgacaggctacctgaacacacacacaaccgagtcctagtcacagcttcagtgttgaccagctgggtccccgtggtcaggtctgtcctccactcagacccggagtccccacacccgtgaaataagggtcagaagagacggcttcagtctctactattctaggggctctgcaacatcctcttcagaacctgtttctaagaggcacaatttagacaggggggtccaatcttttggcttccctgggctaccctggaagaactgtcttggccacacataaaatacactaatgctaatgataggtgatgagctaaaaaataaaacttaaaaatcacaaaaaaaactctcaatgttttaagaaagtttttgagtttgtgttgggccatgttcaccccgtggaccacaggctggacaagcttggtttagacccagagaagtctactcaaaccaatagttaactgagtttagaaatacagattgagtatccctaacctgaaatgcttaggacccaaagtgtttcagattttggtatatttgcattatatacttattggctgagcatcccaaatctgaaaatccaaaacctgaaatgctccaatgagcacttcctttgagcgtcatgttggtgcccaagatttttcccattttggagcatttcagactttggatttgcaatgctcaacctgtagaaggagcgtatactaaaaccaaccagaatgcacatacctcatcaaaaacttcaagtcccataaaatgctgtaggcaatcgtctgaggggaaagaagagagagatacttgagtctcagcctttccaaaggcatttccacagacttcataatacattaggccgtctctccaatgtcagctggagtctaaaacacacaaaaccattgtaggagaccgaggacagatctaagctcaaaaatgtggttctgtatttctcaagaaatgtgctatgatgttccagagaacaaagtgattctgagaccactgatgtggattcagatattctgttcccagcatttcattctgaataaccaagtattcttctttatgaagcaacgtgataacaagacagcatcctggctgcagccaagctcgagacttcccttgtcacggtaatcatagaaatgggacaaaagatggcccagtaccgaatgacctgcctctacagccctgcttgggctcacgacttccccagaagagaaaggagctccaggcagtcagagacatgcagggggctgaagggggagtgacactgaaccctcaaggatgtcttttcagaagctctgctccaccagagcaaagagaagggagccccgaccacgcggcccgtgtacctgcagagctatgattccaaagagcccgaagcaggcgtactgcacgaagttcctgctcaacaccaggacgcagccagctggagagaaggacaagggttagggggcctgagggtgggtgccggcggggagcactgtcttgatacactgctacctcacctggcccttaggtccagaggcagccaaaccacctacccaagcaaaagacaacttctggaagaattaatgataggcaaggaccacacatggtaagctgactagacttatcacaaacaccagaaagtggagcccttgccgtcataaagaatgggctgtttcccacaatcagctcccaagtcagccacccacctgaggtaggcaattaactgctctactgtggactgccagccagactccagcatctcctgctttgggtccctgacagggaccatgtcctatttccttagcaagctctaaagcagtgagctcagggctagagactaagcgtccccaccaaggcttgcagaaccggactcctggcctggcacagctgagctggagaagaggggaatggaggggggacagcagtccaggagacccccgagttcacacacagcctcccaactgctaacgatcatggaacaagacgcccagtgaatcctgaccacccgcaaagccactcactcagctgtcccagcaagttgaggaagacgaaggacgaggccagcaggtagccgcagttccaggtggtgtcgatgtagtcgcgctgctcgctccactggaaccacatacggatgccgtcctccaggaaggtgctgatcagacagaggcgcgccacgtggggcaggtactgctttgtgacacggaggaactgcagggccacagaaacccaagggtgaggtggctgcggcggggagcaccaggccgctgccaggcacgtccttgggcggggtgtgtgaggaacagacgctgtggaaggcaagagctcttgtcagccccggtgccttcccagggcagactagggggctctcagtgcttgctcctgagcgctaccctgtgagtctggacacatgcaacaatccaaggatcagtcccggagatgcatgacttgacgttaggccctctggggcagatcctatagggcagcagccctaacactctgctaccgtgatttcccccagtgcctcggcaggcaactacagtcttccaaggtggcactgccacaagacacagagctgctcttttcggtcaaaggcatttacaagttggaatcacagaatgacatctgaaaaggcacttagaggtcatctatccaacgtttctgcacctcagcactactggcatctgaggccaggccactctttgccgtgggtcatcctgggtgctgcaggctatgacgcacgacatgtctgcccacgacatgccagcagcagcctccctcctgaggcaccgctgcactttgccaggcatctccgctgctctggtccaacccctcaccttacaaatggctatattaaacccagcgggaaggggttcccctaggcttcgcagacctgatggtgcaatgccaagacttgaccccagcctgcaggtcacacatggctgaggtgccaagggcctggacctcccagcctgcccagtgacgcccagagtaccctgacagaacaagggttggcttaggtgacagccagggtgccacacctagagggccacatggttgactgaatagtaagatcacgtttacagttatccgaaaatctccagagcagcaggaggaggccccaggctctggacagcgcatgtgtgctgttgcaaaccagggctggcgcttcccagcccgacggagctctcccctgcaagctcaggatctgacgtggggactgtgtgtgcagcaaccgtcagcgcagcatgaagctggtaccgctaatggctagaaagcgctgggattttgtcaaagcctgcataatctcgagcaaattaaaacacactaacaaatgggatggacagctgtttcaacagcaatgaaacgcaagtgtgtgaaatcactgtcaaatgtcaaagggaaagaaaacatttatgacttcctgctgtgctgtgagtcaggtcatttatgacggctgggttaggtagccaacatgcactatcggatgccaggtacaaatgtcacgcaggttcaccccatgcacttttctcttatcacccatgcaaaactgagatataaagtgaaagaaatactgtaacacagcaagtccttcggagaaagatcaggggacccatccaccaacgcatgttgggaagccagagtctaaagagcacccgagaggctgacccccacgggaggcgagcgaacgtcagctgcacaggcctcctagggctgactaaacctactgttggaacaaaggaagatatgcgtgtttcttatttttcagcattttttaaagttgcttcaaagtcctagacactgctgaagctgcccatctcagttaccacgcccctgggtgttcaggtcaccctccagcctgtcaggtggggccctgactaggtcagcactgcagattggctcccatgtggcagagaacggaggcagagattacaaagccaggtggccattctccccaaacccactgcgccctgcagtgtcagttctgcacacatttactcagcctttgactccacggaagtgatgggagaaatcacagtgaccgacagatacccagagaatcaccaagtgggtttgggagatgaagtgcaggtggaggttctgaggccctgtgatctcatcctgccctggtaccatccagccagcacaccgtgtgacctggacacgcccagttacttttttgagagtgtctctactatcctgcagtagagtgaggccacctgaactaatggttggtaagatgctttccaactttactaggaggaagaccttgtttcactttttatttttaaaaaggccccaaatactcccctgtgaattttagggccaatgcagagaaccagcacaagatgcccatgtgcacagtgtgacgcaacctgcatcacactgggtggtgggaaaggtgacgccacacaccctccccaggttctgcctcatggccccgttgctctctaaatgcccagcaacagtgtaatcacccatattccatggaagagagaaagcacaccaccgtggcacacgatgtgccactgctctcaaggaatggcctcacatcgtggcccagctgggaagccccagcaaggacacaagcctttatctcatctgaacctggggaaaagcaaccactgggaaggaagagctcaacaggaggctgtccagacctctgagatgagacggagccgtggtgggactcccagggcagggtgtgggtgtggggcgtggaccccaacagcagcagagaggtagactgcaatccatacccaagacagacaccagaggtgttctgacttgcttctaaaatgagagctgtgagccactcactggcctgagatgagcaaaccagcccagccatgggctgcggtctaagcctcccccagttgcaggacctgcatttaacatgctcatctacgtgcacagcccacgagattgaggcagtgtttaaaagtctctttgaatgagtctgcgactcttaatttgagtgtctgggtcaagaggattaaagagcaaaaaagagagagaaggtgggacaggcaattcacacctccttccctgcgcaaacatggtgacgaaacagacacagctcttggctttggggaaaaatatgcaaaaatctaggtactgccttctgaactgagcacacctactgcttggctgtcctggttttcaaaggcaagcctggtccacactgaaggctgaagtcaggctgatgcagtctcctctaaactggccaccatttaatgagcatctgtttggactgaacactgaaaaagccacgtttaaagacaaggcccaacattaaccttatttcctacatgcatgttggtcacaactacttcaacttggccactggaaccatgtcatgccactctagaacacgtcccagagccagtgtcccctcagcacagcagagaagagccctcaacacaggcaggacacacagcaccccaggacagacaagagcagccgcactgcaggcactaaggccattgctggtagccagcacacaggtgacctgtgtaaacacggcgagcacataaaacttgtgacagtccccctcccccccattagagaactgcgacagcagagccagaggtggctgttgacctggcaggctgcaggaagaagatgacagttagctcacctctgtggccaagcttctcattaagtctctccgagaaccgcgccatcaagcaggatatggttcataagcagtgacagcatctgaggggcttaacaggaagactgatatttctctcaaaggggtggttattttagacgactgaaggggattttagaaacgtaattaattatatccaccctgagatgacttcctgggcatccagtgatcactgtcacagccacctgcagctcccacgccacacagaaaactccactttctcttcacactcaggacagaaagaaattgaggaaagcagcttgcaaattcgtggtgaatgtgaacatcgacgaaaaaggcaggtcagatttccttgatcaccaaggactggggctgccttgttcaaagcccaactcaggtcccacacatcctagaaacaagcacctgcggcccagcggcttccctcacatcagcctgtcagagctggctcgagctcactggctcactgcagctccagaacttccccgagccccgctcccatgctgctctataggttcacactgcaccctgcagggccagaaaggatgtcgccagcccaatgtgggagatgatggcctggctttactaaaaaactgtgtgatcaaaatcccaactataggaaagacgtaactgagaacgactgggccccatgttctgggaggagccccgctaaccacaacctcctctgctcctcgcccgcactcccctgaagagtgagttttaacctcccgttaagatcatcgcacaaagaaaagtgagtcagctcctctttgccttctctccccactccttcatgatatagggcagggtatgacagagcctgccactgtcaccaggactttgccacaccagtcaccagcatggtgttcatcgggaccctcacagtgcctgtgccacctgcaagttcaggggtcctcaggcctatccttgcttccccagcacttcaactagggccgaggccagctcctagggcccaggactagctctgccactcttgaggacaggttaaaaacaccaaaggtcacactggagaggaaggccccatgcagcttttctgtcaccttggtgatgagccaccaggcagaacccattaagtgctaatattgctgtttatgggtataaactgcttagaagctacattttacagagtgtctaataggcaatgaggagcagctgcaggcatggacattagtttggattgctgagttcattagtttctggacccttcccatggcttccaaatgccaagctcctgcatagagcacgtctcagcagtttctacagagcatggctcctgggagcaagaggacactgtccctggctgccagagcaagcagcttgatgccagaggcagagagacaagagatgcaactgtggggagcctgccagcagaaactaaccagactgctcgtccccgtggaccagcctctgcaggccagaaggaaagatcagtcaaccaagcagtgaggaacccagcctttggggtaacaggatgcggactcagtctccaggccaccacaagccagtgcggccagccaacctccctctgcccatctgaagatggtgacgctctggccaacctcctacagtcaagaagttcacaaaaggaatgtctatcatggacccggcccagtgaaagacttaatgtcattgtcataatactggaagacactgggcctgggaaactaagcttacttaggtcttgctttcagcagcccacactttctggtcaaatcttgtcacttcagttttgctcttgttttctgaagatgtgaaaaaatggatgtgtcactttatctgatcagtgacttccatggtaatcctctatcggcttcaaattaggtcattttcatgtaaaagcctggtctggcagctttaagtactatgtgaataaagagaaacaaagccccacctgggcttggtcagattctgtccacaagaagccatattttgacttcgaaccctgtttacttgcctgcatctgtctgattggggtttgggcgagtacaagtagctgccctcccaagctgcccacaaaagggcatggaagctcccacagccatgctctgccaccacctagacggactcttaaggagatcatctgacggcggcagcctgcgctgccttacagatatggtgccttacagatatggtcctaacccacttgggttttgtatgtgagcagccccttcacccgctagtgctcttcccttgacttgtgccagaagagcaacaccaggggctgggggcgctggggaccaagacccggcttttcttggtcttggtcacaggcaagtctaggagcctgagcaggtttggcctcccctcagtaacctgggagaggtcgactctgtgccccctcaagagcctttccagttccaagctactgcttctttcatttaaaacataacagaatacatgatgaaggctgggcgcggtggctcaggcatgtaatcccagaactttaggaggccaaggcggatcacctaaggtcaggtgtttgagaccagcctggacaacatgacaacatggcaaaacgctgtctctactaaaaacacaaaaattagcggggcgtggtggcgtgggcctgtcatctcagctactgaggaggctgaggcaggagaatagcttgaacccgggaggcggaggttgcagtgagatgagattgcgccactgcactccagcctgggtgacaaagtaagactctgtctccaaaaaaaacataataacaaaacatgaagaaaaggcagggcagggtggctcacgcctgtaatcccagcactttgggaggctaaggcaggcggaccacctgaggtcgggagttcgagaccagcctggccaacatggggaaaccccgtctcaactaaaaatacaaaaaaattagctgggcgtggtggcaggcgcctgtaatcccagctacttcgggctgaggcaggagaattgcttgaatccgggaggcgggggttgcagtgagccgagatcgcaccattacactccagcctgagcgaaattctgtctcaaaaaaaaaaaaaaaaaaaaagaagaagaaaacagtatgtgaagacactgggaacttttttttgtcaataggggagtctgtcatttgctagtgggcagcagcttgactggagacatttgatctagatttggttatgaaattcacttgcaaatccaggttttccaggacaaagagcgagtgtatgtagctctcatccttccctcagctatgaggagccatcttcttagggagctgcgacttggagaaatataaatgggtcactataaattatgtcaatgaaaactgacaaacctaaaaggtctacctggttcttgagagcttttgatatgaattgtttttaaaattgtgtctttaaaggctgggtgccgtggctcacgcctgtaatcccagcactttgggaggccgaggtgggcagaccacctgaggtcgggagttcgagaccagcctgaccaacatggagaaaccctgtttctactaaaaaaaaaaaaaatacaaaattggctgggtgtgacggtgcatgcctgtaatcccagctactcgggaggctgaggcaggagaatcgcttgaacccaggagttggaggttgtggtgtgctgagatcacaccattgcactccagcctgggcaacaaggtcaaaacaccatctcaaagaaaaaataaataaataaaaataaataaacaaataaaattgtgtctttaagcacaaaatcagaatcttagggaaaaaatgcttcgtcaagttgattactttttccctccaaatttaaaatattggctcacagaaagtgttgcaatgagaaccgatggtgaggtcacactagaaagagatcaccccccaggaggaacggaagagctcaatagctgatcagaaaacggtcacttactcttttcttttttttttaaaccacacatatacaagccttccgataagtctaggcctcagagtttgatgactcactaccacctccagaaaaatttaaaaatttaaccatcactacttaaaactctagcaaagccacacgaacacattaagtaaaccgaggaaaaaacggcaagtgggccacacaaggctctccctgcggggataaggctgttaatttgtcgacataacgggattcttttagaagtaaaaggcataaatctgcgtaaccaccaccaccttttgtttttgtttttttgttctgtcaagcttaatcaagaaagagggaagggagttgtgtcccttcactttgtaggatcggatcctgtccacccagttcccgaatgctctcaacagttacccaaccgcctgtttcaaaggcttccctgttgctcagaatgccacctggacacttctggaaggagactatcagggagataggcttcccctcctcccaggctgtgtacaggtccccactcaatccagcccagggcagagtccaaacggggagggagacgcagacagggtcaaagggaccccaagagtccagcacatctgggaaagagaaaaggaaaaggtgctgtggcttcctgtagctggggcgcacgccagcgcgccccctttcctctgggaggacccccggcccccgttcgtccccgagctcccagcccgcctccgggagccccagtgagaggaaaaacgtgcggggaccccccagcagctccaaacgccgaggcgctccccgcgagcctcagacccgacccaacgccaggactcgcgccgccggcccgggaagaaacccccacagcccgcgccccgggctggctggagggtgggggcggctagccaggcagggcgccgaggcccgggctccgggagcggcccagcgggcaggggagactgggcccggaggccgggtttggggctgtccagccgggacagagggcccgggcgggggggtccctctgtgggaacaaggagtcagggggcggcccgggcctggcgccctgcgctgggaggccgactccggagcggcccgggcggcctgggtcgggaccggggccgggggaggagcccgcaggccgcacctggtcggcgaagtcctcggccgtgcccatcaggtcgttctggcccatggcgacggcgggaggctcggctcggctcgctcgctcgctcgctggctctcgcccgtcggcgcccgcacccgctgcggcctccacaggaagtgcccggcggccggcctcgctccgcgtcggctgcggctccagcggctgccacgtaggccaagccttaaaggggccgcgcgccgcccgggcccgccccggtgcgtcttaaaggggccacgcgccatccccagcctcccgacccatccgctcgaagccacgcccgccgcgctcgacgccacgcctctcacgctggaggccccgcccgccgcgcgcaggccctgcggtccctcccggcccggcggaacgcgtcccttttaagggggcggggacctgggggtctggggccagcgcgcgggagggacgcctgagtgcctcgagggcgccgttcgggcggggaggatcccgcgggtcccactgacccacgcggggtggggccaggggtggacgctcgcccgtacgcggtcgctactgatcatgcttgggccagggtccaatcgcaggcgccccacgcagggggagcgaggcccagggtcccccggagagcccatggagaagtaccaggtgccgagtgttccctgcggggaggcgggagctccgtggggtaacggtcgcaaccctggagctacggccggcggttccgaccgagggcggcgaggggcccgcgccctggccagtgtcggcctgcagctcctaggttgaacccggggggcctccaacggtgacctcctgggtgccctttgccactcagtttccccctttgtgaattgactaaggattctccagccctggctgagtatttgagggcgtggggcagctcctctatccttcgtgcctggggtctgtgcgcttgggtccaccgaggcaggacccccgggaacatcccgagtacataattgggagcccccagtcccctaaaaacacccctgcagcgtgggtctgtgaaaatgtttgagacctaaaaaattcacaaaacacaaaaggaaagctgcaaaataaaagtaaatgtttaattaaatgcttctatacatgatatatacactttattaaatgttagattcagcatttgtgaaaaatgcattcgcttggaaacagtttgcgggttagatttttgtcactttggaagaattgtctttgtgtgagaggactatagggcgttgccagaggtgaagcagatgagcttctggtggccagataatttttaaagtaaagttgtttttcagattaaaaaaaaatagacgtttcaggaatatacctgcttttggaaaaaaaaatagacttgattcgagatacggctccattttactgtttaatttgctgcctaagcttgaacgctctcacaccagctctgccctcagcccgctgtggcttagaacagcagtccctggccgggctcggtggctcacgcctgtaatccccaacactttgggaggccaaggcgggcggatcacctgagatcgggagttcaagaccagcctgaccaacatggagaaactgtctctactaaaaatacaaaattagccaggtgtggtggcgcatgcctgtaatcacagctactcgggaggctgaggctggagaatcgcttgaacccaggaggcagaggttgtggtgagccaagatagcgccattggactccagcctgggcaacaagagcaaaactctgtctcagaaagaaaaaaaaaaatagcagtccccaacctttttggcacaagggaccagttttgtggaagacaatttttccacagatggaggcgggaggatggttttgggatgattcaagcacattacacttagtgtgcagttcatttctattattatgttgtaatacataatgaaataattacacaactcaccataatgtagaatcagtgggagccctgagcttgttttcttgcaactagaccatcctctcgggatgatgggagacagtgacggatcatcaggcatttgtttctcataaggagcatgcaacctggatccctcacatgcactgttcacaatagggttcacactcccatgagaatctaatgctgctgctgagctgacaggaggtggagcttgggtggtaatgcgagccatggggagcggctgtaaatacagatgaagctttgctccactgcctgctgctcacctcctgctgtgcagcctggttcctaacaggccacggactaggttggggacccctggcttagaatatccagtgtcatgagcaggctgctcacaaggctggattacagactcctaagacttttatgggctccgagagtccctaggctcaggcttccatcctcatatctcctcctctgggtcctgccctccctcccccaatcctctgatgaatgtcagcctccagcaatccccggcccagccccctgccccatagcacttggtctctgcacagagttctggcttggtggccatctctccagatttggctcaaatcacaggctctaagatcagacccccagagttaccccaggcagtgtcctgctttctagtgacatagcctcaggcaaggacctagctccttgtgcctcagttttccccaatgtaaacacagaggtagcaatggtgtcaactgcaaagggtggctgtgaagtgcttggcaccatgccaggcacacaatggcttcctgattgtaccagtcacaagattggttactttcttgttggaaaccagttgggaggtggatgctggaagttgaggtcacagaggtctatagagagtgaataagccctttttctctgggaggttcttgcacttgagtgcccagctggtcctcattgcaggttgggggagggatacagggttgtagaagagctccagaatcggccccaaataggtgagatcagagttctgccattgaaaggcttcttgccctccttgggccatttcctctattgcaagatggggtggagccacttgctctgccagcctgacaggggagttagcagggccagaaaaggagttggagctgggcttttggaaagggaaaagttgtgtgcatttcctgaaagcttctctcttccttgctgataggttttgtaccagctgaatcctggggccttgggggtgaacctggtggtggaggaaatggaaaccaaagtcaagcatgtgataaagcaggtaagaggccaagcctgtgcatcccatgccgggtggttctgtgactgtgattttccccaatacaagctcttcccatgttggagaagcttcctgatgcggcagctggattcctcgctgctgacacttgcggagactaatctggttggggtagatgtgggggtgcgtgaagctctgtcaccttgatggggaagcaatgctaatttttactccaacaccaccacctcccaccatttacgcatcacgtgctgtatgccaggcactgactcacttcatctcccgtcaaccctgtaaagcagaaacaatgaccctgtttatagccaaagacagtgaggctcaatgcagcgccagactaggcaaggtcacacaatttccaagaggatttgaattcaggccacctcactgggggacaccgtgctacccagtgctgggtcaccagttttaccaaaagggagccaggcccagagaggatggggactggctcaaggtcacacagggctaaggtcacacaccaggccctgagcccttccaccacactcctcaccagggctagcagggcatggggaggtgtaggcctgcaggaagacagccctttgtgtgtccgagacagggaggtccagatcaacagagggactagggtgagaaagctgctgcaagagtccctggcatgccctcctctctgtggtggtggcagggacccagcaggttcagggctggccatacagcgggaggagccttgtcagcagctgctactgggccaggcctcagtccgtacagctccgcagtctcaccctgtatggctgggcctggagtccttgcccctgccctgctcccttgctggctggctgtggggttggcccccttgtctcacaagccactggggcagtgtggctgactgccctctgagcagttaaggagcttttttttttgtttggagatggagtcttgctctgtcgccaaggctagagtgcagtggtgtgatctcagctcactgcaacctctgcctcctgggttcaagcaattttcctgcctcagcctcccaagtagctgggactacaggcacacgctgccacgcccggctaattttttgtattttagtagagacagggtttcaccgtgttgcccaggctggtctcgaactcctggaactcctgagctcaggcagtccgcccgcctcggcctcccaaagtgctgggattacaggcatgagccaccgcgtccggcctgaggagcttttaaaaatgtcagccatgactaggcatggtggctcatccctgtaatcgcagcattttgggaggccgaggcaggcagatcccttgaggtcagaagtttgagagcagcctggccaacatggtgaaaccccatctctactaaaaatacaaaaattagctgagcatggtggtgggtgcctatagtcccagctacttgggagctgacgcgggagaattgcttgaacccgggcggcggaggttgcagtgagtcgagattgcgccactgcactccagcctgggtgacacagcgagactctgtctaaattaattaattaattaattaaattaaaaataaaaatatcacccaattatttctaaataaaaattggggaaagagagtgtaggtaggagtttatgggttcttccagtcttttttcctaagcgtttgtaaacttttttggattcaggagaatggtatcgttaaagttgatagcatcctttttatattgcaaacatagtttcatgtcattcccacagcctcctcctctcttggctctggcaactgtgtggcctcccgtcttgcttgatgtgctgtaactaacccaagccatccctatcacatgggctgagcattgagcttgttctcaatttttcactttgtgtaaacagctctgataaagatgcttatggcattatggttttgtttgtttttttgttttgttttgttttgttttgtttagcatccatgatttccttaggaaaaattcctaggagtgagatttctgggtcatacgatgtaactttttttttttttttttttttttttgagatggagttttgctcttgttgcccaggctggagtacagtggtgtgatctcagctcactgtaacctctgcctcccggattcaagcgattttcctgcctcagccttcctgagtggctgggattacaggcacgtgccaccacatccagctaattttgtatttttagtagacggggtttctccatcaacatggagaggatggtcaggctggtctcgaactcccgacctcagatgatccgcctgcctcggcctcccaaagtgctgggattacaggcgtgagccaccccacccagccgctttttttttttttttttgagacggagtctcactcttgttgcccaggctggagtacaatggcgtgatctcggcacactgcaacccccttctcccaggttcaagtgattctcctgcctcagcctccgaagtagctgggattacaggcatgtgccaccacgcccggctaattttgtatttttagtagagacagggtttctccatattggtcaggctggtctcgaactcccaacctcaggtgatccgcctgcctcggcctccctaagtgctgggatttcaggcgtgagccactgtgcccggccacaatgtaacattttcaagtctttccatgttttggccaacttcacctcctcatatgccccctaggacaggaggaaaggaagacaggaaggctcactcagtgtctttgccctggattccacgggacagtgccactggcatctcaggtctctccatagatctgggaacaattcactaactttacatgatggtctgcattcaccccattataagagtacttcattcataagtcttttgagcaaaattctgggtgaggatctggtattagagccagtggtagtatatacctagggcctgtgccaccaagcgtgctgcagactcaaagctccgtgctgcccttgccaccacccttccctttccatgccctccccacctccacccggagagggcacaggagagaagagcactgtacattccatgcgtggagacaaccttccccatgtgggtaaggaatgaagtggtgagattgatgctttcccaaccagaacaagatgttcctgtttaaagacggtctgaaaatggatcctttactgagttcttggagcgtatattatgctgtcctaaacttatctttgcaaaaggagcaaagatgttctcattgctctaagtatttttagatctctgccttaggaatatcttccatttgtgccatatggtgggggcaggaatggtgggagcctgtcactcctgctaaatagtgatgatggtggtgatgatggaggtggcaatgatggtggtagtggtggtgatggtggtggcagtgatgatggtgatgatgatggtgatgataatggtgatggtggtgatggtgtgatgatggtgatggtggtcatggtgatggtgtgatgatggtgatggtggtcatggtgattatggtcgtggtgatgatgtgatgatggtggtggtggtgtgatggtgatgatagtaatgggtaatggtcgttgtggtggtggtgatggcggtgataacggagatgatttgctacatgtttattaagctcatgctcttgtgcccttgcaggtggaatgcatggatgaccattacgccagtcaggccctggaggaggtaactctcagggtagttttccctctggaagagctcaatggagcatacacagactgtgttctgtaccttcttgttgagtgcctggatgaagagaaggctggagggagggatagagcatcagcaccagttttgcctcagctgtgaagccagcagccccaggtcatgaagggagtccatgccccaaacactcactgctaaatgcaggtgccgacaacttagaacatatgttcccagagaacataaagtttaaatattgggctgggcacggtggctcacatttgtaatcccaccactttgggaggccgaggcgggtggatcacttgaggtcaggagttcaagaccagcctagccaacatggggaaaccctgtctcaaccaaaaatacaaaaaaattagctgggcatggtggtgggcacctgtaatcccagctacttcgagaggttgaggcgggagaatcacttgaacctgggaggcggagattgcaatgagccgagattgcaccattgcattccaccctgggtgacagagcaaaactttgtctcaaaaataaataaatattggccgggtccctaggttaatctaccaataacttctttaaatattttttcttcaatataaaattattaattacagcagaaaattttaaaaatacagaattgggttttcttttgtttttacctttttttttttttctttaatagcaatggggtctcaccattttgcccaggctagtctgaatttctgggctcaagcaatcgtcccacctcggcctccaaagtgctggggtacaggcatgtaccaccacacccataccagaactgtttaacaaaacaaatataaattacccttaattctaccattgagagctgcccagcagtaacatactcgtttacaataatagcgataacagctgcacttcggtttgattggcaaagcctccgagtagcctttctttgtgtttcttgaatttcccacgagcttgaaggtgtcccctcttatctcatggtcacttgtttgtcttctggaattgctggctctggagcttggccagcaaacattattgggtgtatagtgtgaccgaagcacagtggtgggcccaggctactcggtaacaaatgggaagaaagagcatggggcctgcccagagccgcacgccgccgtggcttttcacgttgccgattcccatccacagcccactaggtaggccacctgctttcatgcccaaccttccaccccaagcagttgtctgtctggctccatgtctctaaggcagccctatctgctcctgtttgggcatgtttcaaagcactttccgccagggcaggggcaccgggacctctccatgtgcccacctcccggtgtctgcaccacctcctccagccagccctggctgtggctgatccccaccttcctggcactgcctgccacagctcactcaccccccatggtatccctgtgaggcagattccactaggacccccattttcagatgactatatgaggcccagtcacccagcacagccagctcatgctggagacaggacccacatcggactgcctggctcccaaccaccgtgcagcttccctgagcccactccctggcccagctcagagcccgaggcttgcatgtttgttgggatgtgtgacagagaagcccgagctgagaaaggcgtggagaggcactgacttctccgtttcctctgctctatcctggcagctgatgccactgctgaagctgcggcacgcccacatctctgtgtaccaggagctgttcatcacgtggaatggggaggtgggtcagagctgacacctacgggctcagccgccacgcagtgggctgcaggaccaagcagactgagcccagagcacgcccaccccccactgtcagaatagctcgtgtggcaatggcagtgactgtaaacgtggccacccctgacctaacactcactggggccaggtaccatgctgggggctttcggtgcatagtctcataggagccccaaaaacctcatcgtcaggagagttttttttttttttggacaaagtctcgctcttgtcccccaggctggagtgtaatggtgtgatcttggctcactgcaacctctgcctcccgggttcaagagattttcttgcctcagcctcccgagtagccaggattacaggcgcgtgccatgatgcccggctaatttttgtatttttagtagagacggggtttcaccatgttggctgggctggtgttgaactcctgaccttaagtgatccgcccgcctcggcctcccaaagtgctgggattagaggcgtgagccaccacgcctgaccaggaggggttcttaacccatttgacagaagaagaaacagaggctaacagaaacaagttgctccaggttacccagctagtacgtggccaagccagagggccaggccagatgggcctgactcccgggctctgcacgcagccaacgagcttgtcctggtgagcctgtgcctctgatgacagagtttttactttcatggaaggagctagttgacctccgtctccacagccacccgacaccggtgccgtcctgggcctgtgcgccccttactcctgcagcccctgtgcagcttactgaccagcaccacatccgtcatcacgtgccaggagggctgcagggcaggaagtactgtccctgtgctcctgatggggcctagggctccggttcaggagctctccaaggccacacagctagtaaacagctgactggggacggagactcaggtccagcagccgggtcctgtaggctggatgacttcttgtctttacaaggagccaggagctttccagtcacttctgatgggactgaggcagacagcgggaggctgagcaggcacaaggggtgctggaggtaaagagaggctgagaagccttctgccaggcgccagcctgcatgagatgtccacactggtgttcccacctggggccaacaatcccgggtccgagcaggaaaggcccctcacacgctccctctgctccagcgggtcttggggaggggacctcactgcatgcactcccaaagattttctgagcaccccctaatgctctcaaggagggtgcagagaagccaagaggacatttccctatgggagggagcacagaattgggggccctgacctggtctgctggggctctggccagggcagggtcctcagaggaaatgggtctgagctgagccctaaagggtgcatagttatccctatgaagggggtgggtagtggtccaagcagaggggtccatgtgtgcagtggcc

SEQ ID NO: 421 - DNA, 58263 bp, Homo sapiens
atcagagaactagcccatctatactgagacctgcagggaaatgtgcacccctctgagccactgacaccaggctctccagcctgcattccacggcagatcctcagggggcccaggctcagctctggcccctcctgctatagttggtgagccatctcattgatgcgggaacttgctaggcaacatgcatcactctaaaccaagatcaggctctccaacctctgtgccacaacagattccaaaggggcccattcccagctccagccccttctgctgcagttatggaatgattttatctgtgcaagaactgcttgggagatacatacccacctgagccaatgtgaaagacccataagccttcttccaacagcagatttctaggggacccagtctcaatttcagccactcttgctgcacttgggaacccagcccaactgtgcagagacctgttgggtggcacatccatctgggccattgacacagccttctggactcagcttcctggccagcattcccacacagcccaagtacattccctgggtcttccccaaggaagacatggggaaagtcatgtcaacctcagagtctttacaagacttgtagcaagcctagacttagagtgtcttctagtgcaaatatggctgcagtggtcacaggctcagggaactcaacagtcaatctacttagaatatactttttctatttagaagaaggacaggcacaaacaaagccagactgtgaagactaaaataaatacgtaatctttcaatgtgctgacattaccacatatccataagcatcaaggacattcaaaaaaatgtgacttcaccaaactgacagattaaggtgccagagatcaaccctaaaatgatggagatatgtaatctctcagacaattaagtcaaaatagtagttttaagaaagtttgatgaacttcaagaaaatacaaagtatcaattcagaaatttatcagagaaatttaacagagagattgaaataaattttgggaaaaatcaaacagaaatcctgtgcagaaaataacaatgaataatatgagaaatgaaataaacagtatcaataacagaaattgaccaaagagaagaaagaatcagtgagcttgaagaataacagtttgagggaaaaaaaggaaagaaaagagaaggaaaaggtgaaatggaatgaagaaagctttataggttctatggaatgacatgcaaaaatcaaatattcaggttattgaagataaagagaaaactgaaaaataaaaaagggtagaaaccttatgcaaaaacataaggctgggtgcagtcactcatgcctataatcccaagagtttgcaaggccgaggcaggaaaatcacttaagcccaggagtttgaggccaccttagacaacacaagtgagttcttgtgtctccagtaatttttttaaaaattagccaggcatcacggtttatgcctgtacttccagctattcgggaagctgaggtagaaagatcccttgaacctgggagagtaaggctgcagtaagccaggatctctccactgtactccagcctaggcaacagtgagatcctgtcttaaaataataattatcattattaattattaataataatagaaaactttcaaaatctggagaaagatatgaatatccaggtataggaaggtcaaagtcaccagtcaggttccaccaaattaaaaatactccaaaacatgctacaagtacactccaaggtcaaaaacaaagataagctcttgaaagtgacagaagtgtgagagaagtgtaggaaatggcatataaggaagatccaatatgcctagcagcaaacttttcagcagaaacttcacaggtaggaagggaatgggacaatatattcagagtgctgaagaaaaaatactgtcaaccaggaatactacacccagcaaatatgctctttaaaaatgaaggggagataaaaaaacttgaccagaaaaacaaaagctgagaaaatttattgctaccaaacatgttctacaggaaatgctagaaagggtttttaaaactgaaagaaaataatgctaatgtgattgctacactaatatggtaatcatggtgtgtaaactatttgtgtatttactaagaagactaaaaggaaaagcaattgaagtaaaaatgaatacaacaatatttgagaaattgacaatattaaaaatatgaattgtgacatcaagatttaaaatgtagtgggagaagggagttaatgcatacaggttttcctggttatttctttcttttcatttgtcatcaaagttaagttggtatcaattttaaataactacttataattatagaatgctttttgtaagaatcatggtaaccacaaagccaaagtctataataggtacactaaaaataaaattcaatgagttaaaacatacaaccagaagaaaccacttaaccacaaaggaaggcagaaaaaaaaagaagaaaggaaaagaagagttacaaaacaactagaaaacaagtaagaaaatggtagttgaaagtccttacctatgaataataacattgaatgtaaatggaataattattcaattcaaagacatagagtggctgaatgacttttcttcaaaagaaaaatcagctatgtgctgccttcaagaaactcattatgtctataaagtcacacatagactgagagtgaaagaataaaaaagatatttcatgcaaatgcaagccaaaaaaagggcaggagtaactgtactcatatcagataaaatagatcttaagtcaaaaactgtagaaagagacaaagaaaattatgataaaggaaatttatcaattcagcaagaggaaataaataagcactcaacaccacagcgtgcaaatatataaagcaaataccaatagaactaaagggagacatagattgcaatacaataatagtaggatagttcaacacccactttcaacaggggacaaatcatccaggcagaaaaccagcgaagaaacattggagttaaattacactctagatcaaatggacctaacagactattacagaatatcttatccaactgctgcagaacttatattcttctcctcagcatatggaacattcttcaggatagaccacatgttaggcaataaaacaagtctcaggaaatttaaaacaattgaaatcatatcaagtatcttttctgaccacaaggaataaagctagaaatcaataataagaggaactttcaaaactgtacaaatatgtggaaattaaacaacatgctcatgaatgactaatggatcaataaagaaattaagaaagaaattacaaaatttattaaaacaaacaaaaatggaaatacaccacatcaaaagctatgggatacttttaagagggaacttcatagcaataaatatctatatcagaaaagtagaaagacttaaaataaacaacttaacaatgcactgcaggaactagagaagtaagaataaaccaaaagcaaaattaatagaaagaaagatataatgaagtacagaaaagaaataaataaaattgaaactaaaaaatacaaaatatcaacaaaacaaaatgttagttttttgaaaagatatacaaaatcaacacccttagccagacccagtgaaaaagagagaaaacccaaataaataaaagcagagataaaaaaggaaacatcacaatttattccacagaaattctaaagctaattagaaactaaacaactacatgccaacaaattggaaaacaatgataagaagtgaataaatttctgcacacacacaacccacaaatattgaaccatgaagaaatcaccaataataagtaacaacattaaagcactaatgaaaaatctcccatcaaaaaaaaaaacctcaagacttgatggattcactgctcaattcatcaaacacttaagtaggaagtaataccaattctactgaaactatttcaaaaaactgaagaggaggaaatgctttcaaactcattctataaggccagcgttaccctgatgccagaatcagacaaggacacacacacacacacacacaaactataggccaataaccctaatacacatggatgcaaaaattctcaacaaaatactagcaaactgaatttaacaacacattaaaaagatcattcactgtaataaagtgggattcattccagggatgtaaggatggttcaacatgtgcaaatcaatatgcatgacatagcaatcaacagaattaaggataaaaaccatatgatcatttcaatagatgttgaaaggtatttaataaaattcaacatccattctgatttttaaaaaactctcaataaataaggtatagaaggaatgtacttcaacacaaggaagtccatatatgatacacccacatttaatatcatactaaacaaggaaaaatggaaaggcttttcactaagattggaacaaggcaaggatgtctgttttcaccacttgtattcaatataatactcaaagtcctggccagagcaattagacaagagaaagaaagtaagggtatccacattggaaaaggaagacatcacattatccttgtttgcagatgacacaatcttatagttagaaaaacctaaagactacacacacacacacacacacacacacacacacacacacaaatcagaaccaataaattaataaagtttcagaataaaaaatgatcatataaaaatcagtagcatttatatacattaacagagatcaatctaaaaaggaaatcaagaaagcaatctcatttacagtaggtacaaaaaacatacctaggaatatgtttaaccaaggaagtaaaagatctctacaaggaaaactataaaacactgatgaaagagaagaagagggtacacagacacaaatggaaagatatcccatgctcatggattagaagaatgaatactgtaaatcacccaaagtgatcaatagattcaatgtaatctctagcaaaataccaatgatgttattcacagaaacagaaaaaagcattcctacaagcgtaggaaaccacaaaagactccaaatagctaaagccatcctgagaaaaaagaacaaagctgaagacatcacactgcctgatttcaaattttgctacaaatgtatagtaaccagaacagcacagtaccaacactaaaacagacatgtggaccaatggaataaaacgatgaattcagaaataaatccacgtacttacagccaactcatttttggcaaagacatcaagaacatacattggggaatggacagtctctttgataaatactgccaggaaagttagacatgcagaaaaaaatgaatcgagacccccctcttttaccatatacatacatcaaatcaaaatggattaaagacttcaatgcaagacccaaaacgatagaactactactaaaaaataatacggagaaacattccaggacattgatctgggtaaagattttttggtaagacctcaacattacagacaactataacaaaaatagaaaaatagtattatatcaagccagaaagcttctacacagcaaaggaaaaaatcaacgaagtgaagagacaacccacagaatgggagaaaatatttgcaaactacccatccaacaagggattagtaatcagaatatataagaaactcaaacaacccaattaaaaactgggcaaaagacctaatagacatttctcaaaagaaatggccaacacgtacatgaaaaaaggctcaacatcactagtcattatagaaatgcaattcaaaaccacaagaagatattatctgaccccatttagaattatcacaaagacaaaaaatagcaaatgctgatgagaaggtggaaaaaaaggaacactcatacactgttggtagggatgtaaagtagtacacccactagggaaaacagtatgggggttcctcaaaaaactaaactagaactacgtttggtatagtccagcaatcttactgctgggtatgcatctgacagaaaggaaatcagtatatcaaagagacatcggccctctcatgtttattacaacactactcacaatagccaagacatcgaatcaacctaagtgttcatcaataggcgaaaggacaaagaaaatattgtatatgcacacaatggaatactagtcagccataaaaaggaattaaatcctgtcatttgcagcaggatggatagatctgaagatcattctgttatgtaaaataagcatgacacagaaagacaaatattgcatgttctcattcatatgtgggagctaaaacagtgggtcttgtggatgttgagagcaggatggcggatgccagatgctggggtggaatggtggagaggaagatgaaggggagctggttaaggagtacaaaaatacagtcagaaggaatgagctatcacatgcagtatagtaggaaaattatgcttaatagtttattgtacatatcaaaatagctagaagaattgtaatgttctcaatacagagaataaaaatgtatgaggtcatgggtatcccaattaccctaactttatcattacacattttaaacagatatcaaaatatcacatataacccaagaatactacagatattataatgaattagaattaaatcttccaaactatacacgagggtgtctttccatttatataggttttaatttattttggcattgtttttctgttttcatagtacaagtcttctgcctcccaagttacatttattacgaggtattttattgttttgtatgttattgcaaatggtattgtacttttaacttccgttttaaattgtttctgtctggtatacagacgcacaactgatttccatgtgttgatcttgttctctgacactttgccaacttttccacttctttaaaatccagaataagtatggcctgagacaagggaggtttgtgtattcatgatgcatatgtatagtcacgtgtatgttgcttgcgtatataccattcaataatcaatacataaatataaataatatgtatctccattttaacaactgtaatttattcctaaagccatatttaaaaataattacatttttaaatgggaaaagtcgtatgaagaattctgtcccacctcaagataactaaacaatttttcagtagaaaaataaatctaaaaacagaaaaaatattttaaaagtaaataaatcgtacataaaacgaagcgcaatcgagttttgttgcactaatgctttcttcctctttctacaccattttgtttgcagaatcggccttttgaaggttccgggttaccctgcagtgaagctgtcattcaagcacagtcagggcccaggagagggcgcagggagggcgcaggcgcgcagggagggctgggcatgcgctcggcggggcctccggctctcggggacgcgcgcgggcggggctcgccggggctgaaccggctgagcttcccagggacgccccgacccaagccctgcagtccgcgcgcgtcaggggtgtgcgctggaggccggaaagtcgaatatcacttcccatcctgcatttgatgtgctttggggttgaaaaagcccttatgtggtaaaaaaaaaaaaaaaaaaaaagtcagaaaagtggcaaaagtcttcaacggcctgaaaaaggccgagacaggaactgagaagctggcagtaggtcctgctactgctgcaggggcggcgggcgccctgggtgggccacgaggcagggacagccgaggctccgcgctcaccccacccgcaaggggccaagcgcagactcaggggagccagaggggccggaccgctgagcaagggctggggaagggtgagtcaggggcccctgtgggactgcacggggtggggggcacgggcccggacctctctcacaaatgcccacgtggtccccaaggctaacgccggctgcgtgggccgcaagctgctctgggcccgcagctcactcccctgggcacagggctgacacccgggcgaagcaggagtgtcccagcttgcttcagcccctcccctgggcccccaggctggtggctccagaaggactttactaagagggtgggaagcatcagtgcaggtacctgccctgggctaagggcctcgtgtgggtgatagccctcagcagggccctcccatttgggcattggcagcccacagggctgtggccgtggagctggagtggcagctcctggatcaccccacacctgcgttcctcaaggcctaggcaccacttgctccatggtcaaaagcatcactttgtgaaacgcagactgagcaaagctggcctaagattttggtcctccaggaatgacggaaggagccctctgcccccatgtagcctatagctgggacacgcagcagccagtgagttggtcacggtatgaaggcttctctcctcccggcaatcacagatcccacgcttggatacttgggagtgaagatgtgttatttcacccaccgactcgttccacacgaccaaggcctgtgcctgccctgagggcgagttggttgagccttgtacagacaactctcagagcgtgggcctgggccgaacctttccctgtgagcagcagcatcagcgtctagaacgacggccctcccggtccacggtggaaggtgcggagctcccgtggtgtgctggcagcgattcgcagaagggagatggagggccacagggcaggtgctcgcacggagtcatcgaggtccagggacaccttcctcccaggtgagctcacaaaggcaccacacattaatcctgggagacaaccattctgatgtggctaaggccatcgacagggaacatgattgtcaggaaacctcaacttttcgataaatgacagcaaaacctgaatgcaggagaaatgtatctcattttaatgcctgacttctaagcatccttattcaacatattatatgtattttttgtttcatgagtaaaatgtacattgagcttcctccagtagctgtccatagaccagccactatcactgccatcattattttgtttctaaacttttctttttacacatgtaggtctagctttttcctccatattgatgaactaaaactcactcatttcacaactcaaagccagggccttcagttcacagcccgttgcctcagacggcctttcctatatcttattgcttcactgtctgactcactccagcgtgtttcagccaagtatacttgtttttattcatcttgctctcttttcctccctcccccaactccccctctttccctctgtctctttgtctctttctctctcccccatccctccctctcttcccctttctctctggatgccctctctccctctctccctccctctcttcccctttctctctggatgccctctctccctctctccctccctctcttcccctttctctctggatgccctctctccctctctccctgtttttcttctctgtgtctgcctgcataatattcagaaatcccaacaagagcagctggagctgctaaagaaaccccagcgttctgtgctgctgccattgcctcctccaactggtgagcccgatcggcccatttttaggcagtgctgtggttggaaatgggcccttcctctggggtccgctacttccctccacctgactcagaagaatgagtcaagagggaagaacagctcgtattagggagagggtcccgtgtgctgttgcctttttcggaatcatttcaatcatgtttgccaaattccctacgaagttctgttccctcgtttgacaatgagcagaggcaggagagatgaattgctaaatggttgtatcccacaccgtgctgggaggctcagcagaacagagacctgtgtcaagcagggcttccttctccaccaggcccttcagcctgcattttaacctgtgacttgcgaggagatagcccgtgatcacaccacaggcctacttacatgacaggaagcaaaatgccaattccttctacccctttcccccaccccggtagaaaccctgctagttctttttaaaaaagggagagagatcatgtatagaaaaccttttttacaatttatttcctgttgttaatctttaaaaatgaggttctagctaagtgcagggtttcagtggtgaaattttgaccatgtgaacacataaataaatatttacagtctttggcaaaacacatgacgtttcatcaacctatacgataaatttgtttagaaaaacataaataatttacaaaaaatatggtacattctaaatactcacatcatcgtcactcccacaccattgtacggttgaccccacaacacagaaacagaaaacctgcacgctgttgacagtcgctacatttaatgaagtatcccaacgcttcgttggtctcgggaatacagctccacacgcaaaaaagtaaaaagtgcagcaaaacaacaacacaacgatcaacctcaaaggaaacaacaaaattaattttatcaaaatgcaatgtgtacattaagactaaagttatggattgttcctgtttggcatagaaatgtgatgactattaacagaaaggggaaaaagatttgccccctatccatcatcagacagacagacttctcttactaaaccccttatgtggagtgggatgagtgactatttcctgcagaaagatcatgcaacttaaagcaaaaaaacaaaccaaccaacaaaaaaaacaaaaacaaaaacaaacttgtgcatattacacatgactgattattgggtgtgcctggcaagactaaatgctgattcttttcagcgtttgaattaaaagaattccatatacagcagatagataacagtaacaaatattgaactaaaatcgctggcaacattatatatttaaggttccatcataaactcctcattattctctatgtattctgttacagcttctagcatgcttcatcgtgacaacctaatattatcaagcctcatattttcacaggattatatacttattagatgtttgtttctagaaattatactacatatgtgttactaggcatatttaaaataagttactggtaaatggagttgcattctatagtcacttaataaatattaacaaaatatttataactggaaccttaatgaaatgtatcatcaaatcaggtaaaagcaacttgtccgcagttaccaaagcctagatacgcgttagatgcgccttttccggcctgtgcgtctgctctggttcctctcaggcagcaaagctggggaaggaagctcaggcaggagcctccccgacgccacagcggcacaagcagcagctaaagcaccgcactttgctctgctaaccttttacttaaatgaggttttgccaaatccacatctggaaccgcgtcacacccatttgcaaggatgtttgttctttgatgaaactgcatctctactgcacatgagggctttcattgtaggacaagaggagagttcgtttatttttgtaactgttttacatgttccgattagttaatcggtagcttatgtcatttgctatgcctgttgtcttctaatctctccttactaaaacattacttcaaatttgaattgacccttgtttataatttatttaatgggatttgtgtgtcattgtagagcaactctaattcaagaatagtgacaactttaagcaccaaaagtagttcagcaatatttttcatgcttaatttatcataatggcttatgcacagtattcccttcaactccatatacacataaatacaataagtaattacattttatatgtaaacgtcattctttttaaacaaacaagaaaaagcaatgtaatggcatgcccaattttcactccacataaagtctcatatatcaccaaactggtttcctctagtgggttagatgttcatctctgagttccattgatatttatcctctgaaggcacttgggtttggggttgctggcaggaggtgaagaaccatcagagttaaggtcaagggacaggaggtgctgctagagagagaagccacaaggaccacaatgaactgaggtgtctagggaccatggcatgcacagggcattgccggaaatgcagcaaatcttgtttaaatatctacaaaaagaaaaaaaaaagcaataaacaattagcataactgggccatgggtagtgatttattttgttttacctagaaccagaaatataattactttaattaaagatgagatctatcatatggatggatggatggatggatgaaatggatgggtggatggatgagatgggtgggtggatggatgagatgggtcggtgggtgggtggatgagatggatggatggatggatggatgaaatggatgggtgggtggatgaaatgggtgggtggatggatgggtggatggatggggtgggtgggtggatgagatggatggatggatggatgaaatgagtgggtggatggatggatgagtgggttggtggatgagatgaatgggtggatggatgatgagatggttgggtggctggatgagatggatggatgggtggatggatggatgaaatggattggtggatggatgaaatgggtgggtggatggatggatgagtgggttggtagatgagatgaatgggtggatgagatgaattgatggatggatggatgaatgagataggtgggttggtggagatggatgggtgggtggatggatgagatggatgagtgggtgggtgggtggctgagatggatggatgggatagatgagtgggggtggatgaaatggatgggtggatggatggatggatgagatggatgggtgggtgggtggatggactagatggataggtggatggggctgggtggatggatggatgagatgggtgggtgtgtgggtgggtggatggatgaatggatggatggatgagatggatggttgggtgaatggatgagatggatgggcggatgagtagatggatggatgggatggatggatggatgagacaggtggatggatggatgagataggtgggtggatgagatggatggatgggtgggtgggtggatggagggatgagtgggttggtggatgagatggatgagtgcatgggtgggtggctgagatggatggatggatggataagatggatggataagtgctgggtggatggatggatgatgagtgggtgggtaagtggatgagatgagtggatggatggatgagtaggtgggtggatgagatgagtggatggatggatgagtaggtgggtggatgagtggatggatggatgagtaggtgggtggatgagatgagtggatggatggatgagtaggtgggtggatgagatggatggatggatggatgagatggatgtattgataggtggatggatggatggatgagtaggtaggtgagtggatgagatgaatggatggatgggatagatgagtgagtgggggtgaatgaaatggttgggtggatgtgtgggtggatggatggatgaaatggatgagtgggtgggtgggtggatggattagatggataggtggatgggtgggtggatggatggatggatgagatagttgggtggatgggtggttggatggatgagatgggtgggtgtgtgggtgggtggatggatggatggttgggtgaatggatgagatgggtggatgaatggatggatggatgggtggatggatgagatatatgggtgggtggatgaatgatatggatggatgggaggaaatgagatgccttgaaagacatcctaacataaggagaagaaaacctccacagaagcaagcagataaatcaaccccaacagggttttgccctgttggccaggctggtctcgaactcctgacctcaggggatccacccgccttggcctcccaaagggctaggattacaggcatgagccactgcccccagccaaacacatgattttcaatgtgtgattcttgagaagcatcctgagccttatttactgcatctgtggaagggtaatgcgcatttgaaggcatggaattagagcagatggaattcaagttatcttccaggtctataatattttgattcaaatatacctgtagcgagataactatagagaaactccttccttccttctttccttcctgcctgcctgccattgctaatgcaagggtaccaatctaaaatggcgtcaggagcctggaagtggaggaaatctaggaaactctaggctatggcacaatgaggatgggtgggacctgtaaataattggaaagtgttctaccagaggcatccaaatgcaattaaaaacaaaacaatccaagctgaccaaatgaaatggctgcttggaatgtgcagggggctcatgtgtggtattgtgcattaggtttattgccctgatgtacagcttttgtaagtggaagagcgcactgtgtacccctttccctttctgggtgccacatgccttccccactaacctgaagtgctcacactcacctctgcattcgtacttgaggtctgagaaatagaccatttcttgagagaagacaaatagacccagccgcccgccagcgtaggtttggtcatagataggtcctgagtctgccatgacctgttttccttcatgcactaagactctaaaaatggtgtttaaaaagaagaagaggaaagaaagacaacatgaactctgtgaagcattcaccagtgatggaaggttggctccggacacaagctgtggatactccgcccagggcttcagtgccccagggggcattgctggctttctcctttggagctccagccacccctggtgcagcactgatccagggcacgccttccttcttgcaaccacactattgtcacaatctgtgagttcacttacagtcacccaggcaagggctttagaggagactctacctttggtggggtgaggaggaagcttcccacttcctgggaagatgcaccggactctccctacttcaccttgtgctaaaaccatgagctcaccggctctcctccccactgtggaagctgcgtgggagcaggactggatacaccaagcccccgacaggaggatggggcatcaatatgaataaacaggaggccccctagggaaacgttccagcgaggccacgagcctgcacttcacccacacagatctgccctctattgccagggactcacacactcctggcatctgtgcagagtccagcctgatcttggtgcttattaactttgaaaaaacaaaaacaccttgattttaaattgaccacattttgtttgaataaaaatcaattataaatactgttaagccaagggaaaagattctgttgggctaactgtgtcaaaacttcatacaaccgtgttttaaattcagccatttatatcaggtacaaatctagtctccaataaagcacatgctaattctgcaaagatgcagttattttaattgcaggtgttctcccctgcctggggtattcattaggagaaaatatggttatcatcccaaaacaaagcagattgtatattctccttttcaaccattttttaaaaatacttaatatttagtagagatgcaggatagaaaagagaaagcagttaatgacgaagaatccagagtaaaacaaaaagttagaattcacttgagcttatttgtctattaatgttcaaatgtgccgtccgatgggaagccccttggaagaaatgcagctgtgctgacctgccctcacctgatgtagccagtcttgggcctgtgagtcaggtgccacctataggccgtgtagtccttccagccaatgttcctggggtcgtgccataaggttcgcacctgagagagaacatagcactcttgagtgccatgggcacccggagccttaaccacagctctgtaacaccaagcaggaagcaaaaacatgactttgcaagttcatgcttaaggctcatggtgctccatatctctctgatgtgtttatcatccaaatctctactgtggattgaagcccatggacagagtgtggctcagggctgagagccaaggcacctgaccctcagattcctggattgaagagcccaggcacctgatcctcagattcctgggttcatgtctggatcttctctttccttgatatgggatgttgggcaaaattcttgaagttttgatattcaattctccctagcttcaatttttaaaatatttttttcatattatatctttgatcattatgtcctatgctcactccctatctccagaagagggtaaaagaggtttaatttgtaaaaggattagcaactgtatttaactggtaattatcaactgtgttgagttgtaaccccaggcacagtgtctataataaagtaagattattaaaataactgtgcctggagttaaaattaataaagacaaaagtggggtctctggactgggctagtcctgctgaaacactctgcagccacagtggtgcagaggagatgtgtgggcctggccagccaacctcacctgccccggcgtgttccccgtgtgccacagcgcgttcctcaggtgctcgcccgtccccgtggtggagttcaccaccttgagggacacgccggagtagccataggcccgcgtgggctggtcctcccagtaggtctgcgtcacctgcttccacatcaccacatagaagcggctgcttgactggtaaccaaagacgaagccggcatagtcgtcgtcccggtcagtgtttacgtagaatgtgccactgaagtccacagacccaaactcgtcaaaacctggatgcaacgccataaggtttcgttagaaacacctttcaggtggccgggagtagtgactcatgcctgtaatcccagcactttgagaggccgaggtgggcagatcacctgaggtcaagagttcgagactggtctgaccaatatggtgaaaccttgtctctactaaaaatgcaaaaattagccgggcatggtggtgggtacctgtaatcccagctactcaggaggctgaggcaggagaatcacttgaaccggggaaaaaaggttgcagtgaactgagattgtaccactatactccagcctgggggacaagagcaagactccatctcaaaaaaaaaaaaagaaaaaaaagaaaaaaaaaagaaacaggtttcaggcaatccccagcttggccctgtgaccatctgacagtggatgcccagcaggcagggcgggctcccctcatcatcccgatgggctcttttaccatgagattagtggaattgaaggtatttcttttagatccaacttacaagagttctgagaggattatgaggtcccatttcatagaccaagtctataaaataaaatggtttactgaaatttcagagacttcagagcggcaggtgcatgtacctgtcaaggttatttaggcagacagtttcacagaccatggaaggatgggggcttccagaaagaccacatggcatcccacctgcatgatcttaaagtgcagtctgcatcttctgtgggcgcctcccccggagaaatgctggcaccaccgccgtgtctcagagactcacctacagcgatgccggggtccgagttggctgtctgaaccagctccttgccttgatggcgaatgacccagttgggatcaatttgggtggtccctttgggatccaaggggaccatctggaagttcctgaagtctgtctcactgatggcattgttttcaggacacacatcatcaatatctgggatgttgtcattgtcaaaatcatctttacaaatatcaccccgtccatcacctatgcacaaagaacaagcaaaaacaaaaacaaaaacaaagaagcaaagtcggtggtcggtggtttgccatttgcttttccgtgtctgagaaacatgagtgcatctttcccagaacatctaagactgagtgctttgcagtgttttgtggattcgtgctcaacaatctccaaaacatttgacttcacaggaacctcaactcttttcacaaaatttttgtgataaatacacagcaaaggccagcacagcaaattcacataaagccatttctcaccgtgttccaaactcaatgctgcaggtataaaacctgaatggctgtcaagtaatatcaacctgcatttccagctttgtgtttggatagttttctgaatgtctgttattacttttcttagtcatccttgccttttatagtctatttggcattaaagcggaactcacactaaaatggtttttcctagggagacatggacttccgctgtttagtgggtccttgtcaagttttcagcggggttgtggcatggtggggagtggggatgaggtgggcctggtgcaaacagggggaccacgaatttgccacatgtgtccagtctatcagtctacggcgatgacgataacctgacaggcagattgcaatgtactgaattagctatcacgtggcctgccgttttggaggaaaggcaagttggattgaatatctcatcatattcttcaactagtttccgttctgttcaagaacatactccagctaccacgtggcaggcacatagttggtatcagggcattctgaaatgctgaaatgctgctctgcctatcagcttctctctgtcccagtccctccctggggaaaggctgcatggggagcaagcccctgcatgcccgaacacggagtccagatgaggcttgctgtgctcactccatcccttcatgctgctcggggagaacacaggagctgcccttctgatcccagcatctcccacgtacttctgagtcatgctgtctcagatgcccctcaagtccttatctccctctgtcaaggacgtggcttccaaagagagcctgtgtcagccaggccccactccaagtgagggccactttctcacagcctccccggaagccccagagcacagctgtgcccttgtttattactcagggacgctgacttagaggactgcagcccatccagctccttccttgggcccccgtggctatgggccacctattcatgctcactgctgagcaaagcagctcttcctctcatgcttcacactcgtgccacttttgttggctttgctttcaaaaaaatcctccttgtcccctgcctggccccatacaccaaattcccaattcatcctacgttcgtaacccgcattctttctaggagatcgtcaacaatctggaagttatatggaggcagggatttctcctcctcccgacgtgcacacacacttgaggcagcacacctgttgaagggcacacacacagccaagaatgtgttgagtgtcaggggagaagaaactcatattgcatggacccacagctttaagaggcccaaagtcattgccctttttccagcagcagatttaagatgatctccgtgcatacatatctctgccctggcgggttgctcagaagccattttcctccacgcccatgagctgagagagcacccaccgtccaagtcctcctggtctgggttgaacacaagccggcagttgtccctgtcatcggggacgccatcgttgtcatcatcagggtcacaggcgtcgccctggccgtctctgtcatggtcagcctggttggcgttggagatgtaggggcagttgtcctggttgttctggtggccgtcgtcatctatgtcctcgttgttgtcacactggtccccaacaaggtcattgtccacgtcggtctaggggatggggcgtgagagaaacagcagaggactgccagtttgaggaggtggagaggaaccagcaggacgcaagcctgagagccggcctcctcgtcctgcagcacaagccccagggccacgcaggggcggctggcccgaggtcacactgaccctgacgtcaggacaagcactggggccaggcctctcggtccaggaatctctccaccctctgccacctctccacagtaattcacttcactaaaggaagatgtgcttcttcgctggaaaagcatgaactaccaggtaattatgtctcttttttacaccatttgcgccatttacaccatttacatcataggataatatatcctatgagctgcatcaagataactgtcctcccttgtctctttcaaacgcaaacctggaaatgaagccaattcctatgttggcatcaggaaaatggggagagaattctgtgaagacacaacctcgctccagctgatgaggtgaaggcgtctattcatttggcctgtggccactgagatacaagaatagtgctgagatttgagttgaataaatgttttcaattgaaatcattgaaaactccatgttatcctgtctttgtggagctcatggaaaactcccaaggccccatggaggggactgatgaggacctgagacccgcctgcccatggctgccctcatctggtcagggttgtgcaccaggggcagttgtcacagtgatcccccacaccgccaccgtccccgcgtccctctgatgaggacctccaaccccgcctgtctgcggctgccctcacctggtcagggttgtgcaccagggggcagttgtcacagtgatcccccacaccgtcaccatccgtgtccctctggtcagtgttgtagacgtagggacaattgtctcgttcattgaagacatctgtaagtgtttaaagggggaagaaaacaaaaacaaaccagaaggacaggtgagtttagaaaaagcacattgtttttcctatcacacgaaattgcttacagccacacttctatttaattataataaaaagacgcctaagaatatagtaaaatataaagactattagattttagaagaacatatgacatatttcattacagttcaaatacctttcatttgaaatagaaccaacttttggagatttctgggtaatgttgcaggaggggtagttgaatgtgctgtcgccgtgtaaatctgagcttgctaaattgcttatttctccctaatacccacttggaaagtatgtgttgagttcccaggagtttatcatccatgcacatgagtaggaaaaaaacaatggcagagagtggcagggtttttagatgtcatatcttatcttaagaaatctgaaagtgatgagttgcattgatactgaagttacaaaaatataaactagcactgaactaaacaataccatcagtgacagtgtcacaaatgacagagcaaaatgttacacggcagcgagtccacaggaagagccagaactgagctgagacgctcgccttgctttggtcaggtgaggtctggagaagggaagtaaggaacacctaaaaaataaaaatggaagggactggagcttgagatctgcatccagcacatcacagacgccatcctggatggggagccgaggagccccctggccaccacgagccctcagacagcaacccaccacattcccagagaacgagaggagggtggaggcagaaatcagtggaaaagatcagactgagaaacccgctgtgagacagaacagcaggttggggtggctcagaaagggggtggctggcgccgggctgggaagaggaccccacgaggcgaagtgtggaggagctggggccgagctccagcgtggaggcgagcctgcccccagctcttgctggttctacagaagcactcgcctggtctccaggcaccccaagagaagggatgaccatgcggtgacagtggcactgggttgcagagctcgcttaccaaggccagcgaactctccggataaagcagcaaccgggatcagtggcagaggtaaccacaatacacccacgttattctaactcctagaagctcagtttgatgaaaacatgaaatggcttcttggaatttttgaatgaagggtgaacattagaaaagatgccatgaagaagcacgaggcccaggactgcaaggctggggtcagagagaggaggataccaaatgcatagctttctctagggcggtcctgtggctggtgtcccctgaccttcaggaaaaggcaaggcagaataagcatgggtccctatgggaataactgaatgaatcatttaatcttatagtagtgtaaaaatgaaaggagcttatcaaaattcagaataaaacatgaaacttgccaatgcctccaattgcgacccttaaaatgcatgcattgggccgggcgcggtggctcacgcctgtaatcccagcactttgggaggccaaggcaggcggatcatttgaggtcaggagcttgagaccagcctggccaacatggtgaaacctcgtctctacttaaaatacaaaattagctaggcgtggtggtgtgcacctgtgatcccagctactcaggaggctgaagcaggagactcacttgaacccaaaaggtggagatcgcagtgagccaagatggtgctactgccctgggcaacaatagtgaaactccatctcaaaaaaaaaaaaaaagtgcacgcatgggaaggagcagaagcacccaccgtccccatcaatgtccacggagcaggcgtcaccctctccattgttgtctgtgtcgatctgggcagggttgtgcacgtaagggcagttgtcacagcggtccccaacctcatccttgtcatagtcagcctggcggggattgaagaggagctggcagttgtcctggaaaaccaagaaagggaagactttaacgaagatcataggaatgtgtgtcgggccgtttagcacttataagttatgtactcaaggttgatgaaaatcaatatagaaatcaaacaaacacaaaagccagttagggctggacggtggctcacacctttaatcacagctgggcactgtggctcacacctgtaatcccagcacttcaaaaagccagtcagggcagggcacggaggctcacacctttaatcccagcactatgggaggctgaggcgggcggatcacctgaggtcaggagttcaagaccagggccgggcgcagtggctcacacctttaatcccagtgctttaaaaagccagttaggcccgggcacagtggctcacaccattaatcccagcactttgggaggccaaggcaggcgggtcacctgaggtcaggagttcgagaccagcctggccaacatggtgaaaccccatctctcctaaaaatacaaaaatgagccgggcgtggtggtgtgcgcctgtaatgccagttactcaggagactgaggcaagagaatcgcttgaacccagaagatggagattgcagtgagccaagatcatgccattgcactcaagcctgagcgaccaaaaaaaaaaaaaaaaagagttagccctcgccaaacactttttccatatcaaatcattttatcattatttatgcatctgtcttttgttgaaaatttgtagattgctaaggcaaaaatggtatatcatacacttcatggtgaggagagatatgtaaatatcaaataaatgaatggattagtgagtcaatgtctcccatcaaagtcagatgtaaaaaagcagtgagtaaaatcttgatctattcttgctagagctgttttgtgtacaaatacattaaaccatttgtgtttgcagcaattttcttagaaaaatggtaatattttaaatgttgccataaaggcaagtctatcactcatggtggtgtcagccttgcccatcactggctcctcagcagaaggagaggaggtcttctatttttttgcagttaaaatagaaaaaattattcaaaacatttccggcagcacaccctgggcagccccatgcactgaggtaaaatccgcttttgcaaaggactgtctttatagtgacctttgggaactgcctatgcacaaacgcttgcaggacaatggcagttacgttgacaagggctgtttggtataaagtggcctcctgtggacctcgctgctcctggaacccagggcaggtgcgcggcacaagctgctcctaccttctcatcggtcacaccgtcattgtcatcgtcatcatcacaggcatcgccaatcccgtccttgtcaaagtcttcctgcccagaatttggcagatgggggcagttatcctgcaattggagaaggaagaatacttggaaaaacatttaggaaagcgcctctttcaggaatgcaggtgaaatgaaaccagcatggcgccgaggaaggaagcgtgccccatcagtcctcgatctcaagcgggagctgagagaggagccaggaggccagaagcgcatgaatttcttctcaactcctgccctggaaattatgtcaccactactcacgagggagacaaaagaaacttgtgttcggagcccagaatcccagtgaggttgccaaacaactgcagaaacaagaagagaatgacaaggtattgctctgagagaacatgggagagaaaagaggctttagtggtgctttccttcccacagacttcagctcataaatcaaaatgccaaagcttataaacgtttaaccctcaccagtcaaaaaatctcaaagaaaagagtctttcaaatatgtatgtgatatgttcagaaaccagggctgagaacttgaaattatctgctaactcagcttttcacggtgagtgggtaatgcatgtaattgggcaaaaactcctttcatttcagtccagttataccataatttaaagctgagctgtgcagacactaacaacttgagggaattggaaatccaggaaaaggtagagagtagcgtgtccgtttcagtttcagtacaagagccccaagggtgtgtcatccccgtggctcaaagcacatcactcgttgaatcagaagacagaacctggggtcttgtgctggagcccagagtttcagcacttacagattaagaaaggagagcatgttgcttgtcatggaggacacggatcccagacgggggcccctggcaatggggaggatccagcacctgtgtgtcgggttaatatgggaacgggcacaggggtcccttgtcaagtctcacttttaaatccttttgtgtatgtgtatatatacatataactttgcaaattatataccattttcgaagttattaaatttccatctaaaattccacaatgatggaaagaataatcgggatatcttctagcagcacggactcagctgcagctgaccttctgaaatcaggggcttcaagaagggtaggctgggtagccaaggggtgtaacataggttgggatcagtgcctcgttgattttaaaacatactcatattttgtttcagtgagtatttggcatctttaatcaagcgggactgacagagaaaattaacacaaaatttgcaagaatgattaaatattaaataaatgaatatatttatattttcaaatgatattttgtgtcagtttgtggcatttccatgtctgaccttcttaaggcataaaactgcactaaaacattttggggcaccctgtgcggtggactgagtggcagtccccacgatggatgtccgcgtcctagtgtcttggcgcccggggatgtcacctgatatggctgaagtgaatttcatcttgtatggtaacaagtggaattaggtcaaggacattgaacagtgaggctcatcctggattatctgggtgggccctaaatacaaccacaggtgttcttatcaaagagaggcagaggaagtttccggagagaaaggcactggagaaagtggtgtgaagccgaccagaggtcagggccatgcagccaccagcgccagaagcccagcgacgcctgagccagagaagctgggagaagcagagggagcacggccccgctagcaccttgacgttgtgtttcaggcctccagagctgtgagataacagattcctgttgttgtgagcctcccgggccgtggtgttcgttccagcggccacaggaaagcagtccagcctgggatgggccccgaaggagctccttcttccagctgagcagctccttatactgcaacacgcttgggctttgggaagaaaaccatgtcctaactctttccaagtgacatagcctggccagacctgcctgagacacaatggcctctgcacagcctggagccgagcgtggagccggcgtcctccctctgctcagtttcaggcgttaacgatgcgcgcaattgcaaatatgggccgacgtgcccgaggttctctgtgcccagcagtgggcggcgccagagtgtgcctgtgtctactaaggacctccagagaggggaccagggggatgcattcaacctggtgatcaggcaagaggcctgagagaccctccttccaaattccctgtgctgcccccgccccccgtccgcgtagcgtccccggcgccaggaggagggctgaccgccgtggccccgtgtgccctgcgagccccgcgcctcaccttgatgcagtggtaggtggcgttggtggcgcagaccagattgaggttgggccagccgtccaggtccgagtcctccccgcagatgagcccgtcgcccgcgtagcctgtctggcactcgcacttgtacatggggtcgctgaagtggcccaggtagatgcactccgcgtgcttgtggcagttgtgtgtcttgtccttgcatgggttttcgggctcacacacctacggggagaagggctgcggggttagcgacaggcaggacgatggctccggaggcgtcgaggcggggcgtcgggcaccgcaggccccagcaggtccggtcccaagcggacccaagtcctgaagtgggaagggctttctggacacgcacttgaggtgctgttcgttcctgaggctccgtttgtgactcagccatcgtttctgagcctcggctgcagctcaccaagggctgcgctaacagcggagaggtggcggcctgaccctcacaggcccggctgagcacgccccgcaccccgcgcggagagcagcggcccagccgagcaggtgctcagcttccccgggccagcccctcccatgcctctcccgggccacgccaccccttcctctccttcctcctgctgcttttctgagctcatctgatttttccaaagccgctcgcaacacacaaggaaggccggccttgcgtacttgcttttccgtcttggctgcttccaggccgaccccgacgggctggttccctctgtatcggggcgggcagggcaggcagtggaagccaggctgagtgttgacacagcgaggcaccttgctggtggagaagcagatgtcggggaccagggcacactgcggggacaagcagacatgagaggccgctcccgacctcagggcgcccacagcccagggcggggtcacccacctcgtccaggtcctcacagtgggtgccattgcccaagaagcccacagggcaggagccgcatgaccaggacccatcggggaagctgctgcactgggctcccgggaagcaggggttggataaacagccatctgggtgggagaaggcggagcagagttcaccacgcgccctgcgcagcacagaaggaagcccgccctgtgggccgtcaaacactctgggatgtctttgtcatcgaattgtgtagtcaggaacactctggtgtgattctggatgatcatcaagaggcatcatctccaagaccgcattgctcaggtggacacagtgcagcgggttgcagaagcacgtgtacattatgactacacgccacgggccacaccacacaactacccacacgccaccttccacaacacacaactgcctacgcaccaggttccacaacacacaactacatgtcaggtgccacaccacaaacctacctacgcgccacgttccggatcacacaactacccacgtgccaccttccacactacacaactacccacacaccatgttccagaccatacaactaccacgtgccaccttccagaccacacaactgcccatgcaccaccttccacaacacacaactacaccccaggtgccacactgcacaactacctatgcaccacattccagaccacacaactacccatgcgtcactttccacaccacacaaatacctacgtgccatgttccagaccacacagctgcccacgcaccaccttccacaacacacaactacaccccaggtgccacaccacacaactacctatgtgccacgttccagaccacacaactacccacacgccaccttccacactacacaactacctacacaccatgttccagaccacacaactaccatgtgccacattccagaccacacaactgcccacacaccaccttccacaacacacaactgcccacacgtcaggtgctataccacacaactacctacatgccacattctagaccacacaactacccatgtaccatgttccagaccatacaactgcccacgcaccaccttctacaacacataactacatgcaaggtgacacaccacactactacctacatgccacgttccagaccacacaactaccatgtgtcacatttcacaccacaccgctgcccatgcaccatgttccacaccgcacaactacctacacaccatgtttcacaacacacagctactcacatgccacgtttcacactacacaactacatattccagaccacacaaccacccagatgccacagtccacaccacacaaccacccagatgccacagtccacaccatgcaactacccacacaccatgttccataccacacaactatctacatgctatgttcccagccacacaactacccacatgccacaggccacaccacacaactacccacacaccacattccacaccacacaactacccacactccacattccatgccacacaactacccacacaccacataccatgccacacaactgcccacattccacaggccacgccacacaactacccacattccacaggccacaccacacaattacccacacaccacattccacgccacacaactacccacattccacaggccacgccacctggcatcttttttgtttttacattagaaatacaggaggactgaaacacagatgttaaaagtagttatctttgcgtgtgcaactaaaattgatttttcttttctgtgtttttcatctagtttcccaaagcgtttgtgcttttcatcagaatggaagcccgggtttcagtgcccccgcttctacccctcactcacccacggggcagctcctcttgttgcacatctgacgctcctgcacatcccccacgcaggccttccctccgtactgaggctcagggctgttgcagacccgggtgcgctcccggatcccaccggcacaggtgacagtgcaggccgaccacggggaccaggggctccagcggccatcgactgcggggaaagccaaccagggggagctcagagcaagacccggggtggagaacgtgagttggctgagtgagagggaagagcaggtgggacatggtgttccctacacagccccacaaactggtttctccccaggttggctgactacaggtcagagcgtgatcgcaccactacgcctgctgcaatggtggattccgggagtgactcagaagccagtgtttccaatggctttgctgcgatctcttggcctccagaagacaaatcataccacctcttctttttaataaaagaatttttttaatagagagggtctcgctatgttgcccaggctgctctcaaactcctggcctcaagcaatcctcctgccccagcctcccacagtgctgggattacaggcatgagccaccgtgcccggccccacaccaccatttacaccgagaagctcagagctcctcgccaagctgtccctctgccatggagggtggcctcaactcagaagcctggtatgacaccgaatgtcctcacaggcagttcccatgaggcgtgagcacagctgaaggcaatccctgcacaccctctttttctcagcacatccatgcacttcccgagccaggcctccctggggaagcccttgatgctttgggccaagcgctctgtaactcacaccctagtctgcacagacgcagggaaaggctatttcagagagacacagttctgtgcatctgcggcatcctctgtccacactcactactcagtccaaactcactccccgtccacactcactgcccatccacactcactcagtccacactcactcacttccatccacactcactgcccatccacactcactgcccatacaactcactcccccattcacactccctccccatccacactcactccatccacactcacttccatccacacttactccccatccacactcactcccctatccacactcactcccccatccacattctccctcccccatccacactctccctctgtccacactcactactcagtccaaactcactccccatccacactcactcccccatccacactcactcccccatccacactctccctccaccatccacactctccctcccccatccacactccctccccatccacactcactccccatccacactcaccatccacactcactcccatccacactcactccccatccacactcattcccccttaaacaccatccacactcactccccatccacactcactccccatccacactcattccccatccacactcattgccccataaacaccatccacactcactccccatccacactcactccccatccacattcactcccatctatactcactccccatccacactcattcccatccacagtcactccccatccacactcactcccccatccacactcactccccatccacactccccatccacactcactcccatccacactccccatccacactcattcccccataaacaccatccacactcactccccatccacactcattgccccgtaaacaccatccacactcactccccatccacactcactctccacattcactcccatctacactcactccccatccacactcattccccatccacactcactctatccacactcacttcccatccacactcactccccatccacactcattcccatccacactcgccatccacactcactcccatccacactcgccatccacactcactcccatccacacttactccccatccacactcattcccccataaacaccatccacactcactccccatccacactcattccccatccacactcactccatccacactcactccccgtccacactcactcccgtccgcactcactcccatccacactcactccccgtccacactcactccccatccacactcactcccccatccacactcactcccatgacagagctgcggtgctggatcattcttcctttaattacagtctgtcctgaactggaatgaaacggggctatctcagaggaggtttgcgctgagcacaggtgagcagaattaatcacaaaggatgggttcattaccgagccaggcccgggatggcagccccctttgctgctcggctggggctgggctgggctggaacaggccctgacaccccggatcccggctccagctgtggctgctcactgtgagctgcctgcaagcccgcccacccagggccccgccttcaccgtacttacttgggcatggggcgccctggcaggctttggtctcccggccactccctttgcaattcttgccccccatctggggcactggggagttgcagagacggatgcgtgtgatattgccaactccacaggtcacagagcatgaagaccaaggtgaccagtggctccagccgccgtcctgccggactaacacaagaagcggagagagatcaggctgtgccgcctagaggggtatttgcctgtaagcggtgtgccttattaaccgaggagcatctcacagctgctgaggagagggaaggagaacccctcccatcagctgggagaaagagcctcacctggctagaatccttgcaaaggcccagcacctcgtgagggcagctctgtcccttgcaaaggtcccgatgactgagagaaacgcggccccacccccacaggcacgcgggtgtcacctgcccgacactcactgcgggtgtcacacttgctcagactgcaagcccgtgtctggatggagggccccaagcaggtgttgctggtgacgtcacaggaccggcctctctgctgggtcccagagccacacgtcacggagcactgggtccactctgcccacggagaccagccctcctcaccgtccaccgctgccagaggaagcaaacacggtggcatcaggccctgcctcacagacgtgccacagaacagaacgggcacagggcagctggcgtggggccacagttcatgcatccaggaatctgaggggccactgcctggctggggcaggtggacatcccagtggctgggccgtggctccgtgggacccaagtttgtgacctgcacgggagttcagggactgcctttcaagagaagagcaaaaacgcctttctgggtctactattagggtgctgaggggagctaaatccatgtgtgtccaggaaagtctcttaatcgattttataaaatagcttgccaaagacagtgttgaatcttttctacatgaggtttcattaaagttacaaaaatgtaacgtatttccatttaacctctgttcgctgatttacataatgtagtgaaacatttcaattattggtgaaaattacaggtcacttatttccaagtaaactgaaacaagctaataaaaaggagattccctgtaaagaaattcttcataggtaatcacagccgctaaatggggggaaagagcaacctgacgccagaaatcattcccgtgaggagagaagcccagtgaatgcgccatgactcagtgttctagaaagcagggaaatgaaagaaaagaaaaatggtcaaggaggtcttttcctggtcatgatgctcctgataacataaaatgtctccttctagtctaatgtgggccctttgattatcaagattatatttttatgctttgccaggagcattctgactttgtgaatacctaacaggcacttttacgcatattgaattgttggttttaattataagactaactgtataggggatacattttctgcatgttacaggcaataaatttgaaactcagaaaaatcccattttattcaaaatcacagagtggcagagcgtgagctctgagtcccttcattctctgtccacatcagaggtaaggtgccctgaggatgacacagctctggggccacagggacattctgggaatgtttgggggatggtgactagtttagtttgggagaagcgttgcctgatcttagtgcagcagcaacttggggtgtagacctgaagcaccttgccaacggcacggcactggggagccacggatggctcaggagctctgggtggggtcagcagagctaacttgggaagggaactcggggcaggggtgggaggcagcacagagacctgagggcagcgttggggccaactcagtctctgaacgtgcactgagtttccagggtggcccaggaacccccagggtgcccacacgtggttcctctccatctcaggttctgttccttagaatgtatttctatcccttagaacatattcttcggataacagtctttggtttttgtttgtctgattttctattgttttttccaggagtgtgtgtacagtgatcacttgctgccataacacagtcacagatctacgtgtgttctctgactctcagctggggctccatcggggcctgctctgggctcacctgcgtgaccactgggctcagcttcctcgtctgagaagcatcaggactggccttcccacccccgcgttcccagggcttccacactcctttctagccatgagtcagtcctcagtggatgaccagtggcctggggtggccctctgattctctcacctgtactcagggggctgaacctcactcttctctgccaaaaccaaccaatgaataaataaacaaacaagcatggaattcctaaaaatgcaggatgcgcttgccggctggcgatactcacagtggaggcaggaagggcagcattcgccttccacaaaggatggactggcgcaggttgcaggcgggcaggtgatttggtggcaaatggttttaaatttctacaagtgaagaaaggcatgcatggaacactcatttaaaaggaggggacgctggtacaagggctgagactagaaggggtcgacagaatggctgaatgttttccatcctacggaccatacattacagagatgtgaaaataagggcatctttttctcccattagtgctgacagcctaacaagaacagggcccccagatggctctttgcatccattccattcctttctcccttcactgagcagcaaggatgcaacagagagctccaagcttcctggaaggagggaagaaaagacgggcagcaggaactcctgttatctaaggtaatgctgaggccattgtcagcagaaatagagtaacattaaaagctaaattgtctgtctgtaagacttcaggcagtggcttgtatttcccccaaacgtttctgctgagcctcaggctctgttggaaccggatggaattaaatgcagagtctagggccatgtctggcttctctgttcctcctgtttctaaccaactggggacgctggccaggttgctccccctctctgggctctggttctttatgtgcaaacaaagaggttgattcaagtcctaaatacggttcctggcccttctgtgtttcttacactgaaatttcctcacatagctgaaccggtttcacacatcagcactgaacgctggcatttccaggcagtcaggttctgccaagtgtccgatggtggcctcttcccccaagagccgtgttctggggcctcaccttgcaggtacacgtggtgcagctgtccaccacccacgtttcattttccgcaaagaaccggccatcctgccagcaagctgacatgttccttgtcttaggagggccaccaatgagctcccagagaaactggttatcattcgactggaaaatcaagtgaaacatttaagtgtagacaataatactacatatttagtcatcatgcttgtggatgaaaaacaaagttcctccttcattaaaaagctctaaagtcaagtaagacttgactcatccctgggtggaagttccggaagttgtcctccatcctcacggggctttctgagccacagcttcgtcactgcctgggcttctggggctccccatccacctgccttcctggagagcggaaatcgcgtggctcacatcacacctggaccagtgcagagcaacgctggggctccttcgactggggacgccaggtgggactggggtgggaactaggtccccaggcagcagccataacgacaggcagggatacagccaagctcctgccctcgccaccctccctgccccggtctcctgccatcgaccccctccctgccccaggctcctgccctcgccgccctccctgccccggactcctgcccctgccgccctccctgccctgggctccatctcctggcatcatttacttcatgccctctgggtacgagtgacagtcagcatcactgcaccctggttagccatgtgtatgttgtggggcaccgtggcccggagcacctcattatgttcagtccctttctctaaactgcgagctgcccgtcctgagccccgcaggcatcgctctctcttcctggccgcgctgtgccgctcaaacccatttcactcctgccagcctcacaggaacttcccgtcctgcctcttcagctatgccaacatgcagtccttgaaataaaattattttcctctgcaggtgtgtgtgtgtgtgtatgtgtgtgtatgtgtgtgtgtatgtgtgtgtgtgtgtgtacactcatacctacagatttaccaaggaggtaaatttcccaaaattaagaatttattttggagactgtgcccaggactgttttccttgggaatacttcccaagatctacccaacttccctctaacaatgctgaatattgagcaaggatcctgaggagcccggcagacacctcccctgtgaactgtgggtttttacatcgagcatgaggcactgccaagccagggaatgttgatacctgctgagatgggccagcggcggagctgcccatgccctatgacccccgcggcccctgcgtgagtacccaccactctcttgaggttctcgctgagctggttcacgaggacgtggagccccgagagctcctggaccatgtttcccagctcctcgcacgagcgttcgcacacctcgggcctcctctccgagctggggcccacgtactcggtggtgacatgcggacccaggcgcagcgtctctgtgttctcactgatggcgttgatctcagctgagggcaagcgtagaagggccgtgagcatcacagaggacggggccagcagcaggggctgggaacagagggaggatgacccgccctggctcccggagcggcctggtgctgggagacacaaggcggaggactgggccagcagcagaggccaggaccacagggaggaccatctgccctggctcccagagtggcctggtgctgggtgacaccaggaacagcagggacaggggacagtggctatttcccacgctgccacatgtcacagaaggagcagagcagaaattagctcaggagtggggagacgcatcagcataggagaggcctgcacagtccaaacgcaggagcaccagtggccacgcatgtcactcagacccaggtcccctctttgcaaagcttccgaccacaaatctgcttcttgaacacatcccccatatgttctgacggctcctctcgactcttcatcctttttttttcatccccaaacaccctttcttatggctccttgctctgctttaaagaaaattcactatcctcttgctcaaacagccagtccccttgagactgtgccttgctcctcctggccttcccaccttcccactgctcctaacttcccaccttcccccaaattcccaccttcccacattcccaccttcccaccgctcccaccttcccaccactcccaccttcccaccactcccaccttcccaccactcccaccttcccaccttcccatcttcccaccttcccaccactcccaccttcccaccttcccaccttcccaccgctcccaccttcccaccttcccatcttcccatcttcccaccttcccaccactcccaccttcccaccttcccaccactcccaccttcccaccttcccaccttcccactgctcccaccttcccaccttcccaccttcccaccactcccaccttcccagtgctcccatcttcccaccttcccaccactcccaccttcccaccttcccaccttcccaccttcccactgctcccaccttcccaccttcccacattcgcaccttcccaccttcccacattcccaccttcccaccttcccaccgctcccaccttcccaccttcccaccactcccaccttcccaccttcccactgctcccaccttcccaccttcccaccactcctaccttcccaccttcccaccgctcccaccttcccaccttcccacattcccacctctcccaccttcccacctctcccaccttcccaccactcccacctttccacattcccaccactccctctgaagccctagatcgtgggacctgggtgggtatggcatgtaatttacaaattgacctgaggcgagtcagggacggaggcggggtccagtcctcaggtcagcggggcctgcgcagttgcagtcagggcccaggctctaggccggagctcacctcacccccatgtaggaccctgctccctctcaggggtgaagatcccatctttgaaatgcctgacttctctcggacagtccattattgaggaaagacttagacattttacagcgctgtcaggcattccgtgattgagtttttaatcacttggttataaactgtgctgcaattcatactaagctcagaagcttcccctcggattcatgttgcccataaccatgtacaatcaggtcaatatcaacacattaatagagacaaagaaaccaccctgagtggattttacccagcacactaatctttaactaacctagggtatttgtttttcattcctctaaaagttaaacaaaagaccgcatatatctttgcttctgctctggctctgacaggaatgtagttttacctggtagtaaaaccttccagctaacttgcatttctccaggcttctgccagtattctcagttgtaaaataataatggctcagcctcttcacaaggttactctcacttttaacaaacagtggaaaaggggatgtcattaccaagaaccaatccatgaactagctgtttgtataagaccaattttccttaagtctgacataaccagtgaagaagaagtctttgttgtgttggcaaagatctccaaatgggacattggcatccacctggctttgagtagactaactcatgggtgattgccacatatggtccggtagatatatgtatatagatccatacttattctacacatctggagataacagatctagatttctctgtgtttttttttttttttttttggaagatctaagagtttcccataagttttaaaggtttgcttttgatagttccagggattattgacttgtacctgtgagcctaggaaatacctgctgaaggaggctgcacctactagggtgtatgctggtaacacacacacacacacacacacacacacaaggtgtttgctcacatagaggtgtaagtcacgtttgtcatagtaggttagttttactcactgaccattatgacaactgactcaacatgccatggacaaccttagctctagtttaactgaacccacgtgaaattatagtacaaacatgtgattaggaacaccgcgaagggtatattttctttcatacaaagaatatttgcatatatgttttgtttataaaaacaatatttttctatattagtgaaaatacacacgcacgcacacacacacacacacacgtatacatataaatatatcagactgaaaaaacattattgcaacaaaaagtacccaaaagccccacagccaactgcaccccaggaacccccagaagagcactgcctcatgaagctgaggccctggcacgcagagtgctggagccaagataactctgcctgtgctgcaaatcacccctcaggtaacaggcacagtgagggtcgtggtgggggtgacagttggagctggaatgagggttggtcttagaacacccttctccctgcattgatgatcaaatgtctccttgttctccttcctcacaggacgtgcacaaggacccggacctgcaaagtgtaactgaagagtgggctacgcaccccggttctgaagtaggcggtgggatcacagagtcattgtgcaccaaagataccaaatctcacatattcctgatgtatagattcatgacataacagtttacgcttgtcataatttggaattgaaatggcctggccttcgtgtgcacacggccacaccgtgtggcagacgtgagctccgctttgaggctgtcagacagacccaggcagcagccctgctccctgctcactggggagctcaacatggcagccacacagcactcccttgggtgccagccttcatctttgtaaaatgaagaaagtgaaagtgcccatctcacgtagtcattctgaagattagatgatgtacggcatttaatgaacctgtcatagtgaccttcagaattaaatgctcaagaaaatattggaaagtgtgcttggaaatatgattcacaattgtaactaacagaaaagatgagatcatctgtcaatgatttaagtagcatagatttccatcatatgatggagtcaacaactatgaacagtataagaaaacttctaggccgggcgtggtggctcacacctgtaatcccagcactttgggaggccaaggtgggcagatcacgaggtcaggagatcgagaccatcttggctaacacgctgaaaccccatctctactaaaaatacaaaaaattagctgggtgtggtggcgggtgcctgtagtcccagctactcaggaggctgaggcagaagagtggcgtgaacccaggaggcagagcttgcagtgagcccagatcgcaccactgcactccagcctgggtgacagagtgagactctggctcaaaaaaaaaaaaaaaaaagaaaacttctgtaagtcaagttcgacaaatatctatgactttccttaggcagacaagcatcacacattaatatactggaaaagttgtctatatttcaactcatattaaagcaccagctatttatattttgtcttctataataaaattatttggatgattaaaatctacttaaaattaactgtttaatcaatttattattttcagatatcaacatgtctaagttgaccagctaagtcactcaaagacaatagtggtagttacccaaatatttttacttaaatttttacaagcatgaatgcacacacatacacacacacacatacaccatgtcacaatagaaatccatccaagccagtatataaaatgcatttttcacaacacacctacctccctggccttgctggcaacccttcttgcttagaatatcttccacagagttttcaaacactaggtggacgttctgaagcaaaccctgtaagtatacacaagcagaaaaatagagcaacagataaacatccaatgtttgatgccaagctaactgacattctaaaaatacaagttggaatcttcaagtagtgagagtatttccttctacgtagcaggtttgcaatctctttataatcagtttttctgtatatagtacttttgaaattttgtttttaagcatgacacaagaaatggaagtgtaatgtaagaaatctacctagaagaaggaaatgtttcataaataagagtgagatggcccttggagaggtgtggcctgctgtgtgttctgggcatgttcccatggacgttcaaggccattcgttccttgcaagtcactcatgattagcgagtttctgcatttggcaaagaggctcacagagtcccactggtcctctcagagacacagaccctgggcctgcaggagcgccttccgcagctgagttatgacggggctgggccagtcctatatggtatggaactcctggacacccatgagaaattgactcaacaacaagctatgcatctctagaccttttactcaaattactgagtttaaccatgtacttatttccaaggccctacacgtccgggagggagcaatgtaccatacaccattgtgattctaaagacctgcagtttaagattcatttccaaacatattttaaccaaaatggacatgaaaccattccctcataaatcactagccctttcccttggaaaagggcacctgctactttgctctcccatcatttcgctactaaagcaaacatttaggagtggttttggttgtgatcaaaaaagtctgggattgctagaaacatttgaatagggttgattccttgatcatcaaaccagcctcaatctcaactgacgataattagtgcagttagggaagcacacctggggcagccctctctgattaatcgtggtttagaaaggcgtgcgttgtgtgtgtgtgcgcttgtatgtggtgtttgcatgtgaaagggtgagtgcctgtgtgaaagtacgtatgtgctgacaactgcctgtggctctgcatgcattgtgtgtgcacgtgtgcctgtttgtatacacatgtgtgatggatgtatgtgcatgcatgagtttgcatgaggtgtttgtgtgtatgtatacgtgtgtatgagtatgtgtgcatttgtgcatgtgtatgtgtgtgtacatgtgtggttctgtgtatgcatctatatgatgttcatgtgtttatgtgtgggggatgtgtgagtgtatgtatggtgtttgtgtaggtatgtaaatgtgatgtgtgtgactgtgtatggtacttttgtgcacgtgtgtatgtgtgtgttcacatgtgtgtggtgtgcgtgcattgcatggctgtgggtggtgtgtgcacacctgttttgtgcacacatgtataagtgcttacatatggttgtgtgcacatgtgcatgcatgagtgtgttcacatgtatgtgtgtggtgtgtgtgcatgtgtggtatgtgcacacgtctgtgaatgtgagtgcatgcatggtgtttatttgtgtatgtgcatgggtgcccacgtagggtgtgtgcacgtgtgtgcatgtgtgtgttcacatgtatgtctgtgtggtgtgcatgtgtgcacatgagtgtatgaatggtgtttatgtgcgtctgcatgtgcgtgcccatgtatggtgtttgtgtgcacatgggcatgcatatgtgagggtgtgttcacatgcatgtgtatgtggtgaggtgtgtgtgtgcgtgtctgtgtgtgtgtgttgcgtggtgtgtgtacatgtgtgatgtatatacatatgcgagtgtgagtgcatatgcagtgtttgtgtatatgtctttggatgtgtgttcatgtgtttgtgagcatgtgtgtttgtgtgtgtgtgtggtgtgtgtgcatgtgtgcacatgcctgtggctgcgtgtggtgggcagtgtgtgcatgtgcatgtggtgtgtgcacgcatgtgtgtgagcacatgccgggatgtgcagtgtgcttctctaaggccaggctctgcctgctcaagcatcgcatcaccagacgcattagcagatcagttcccagctaagctctttcctccctcacggcggccacctccctgcagagcgtaccctgaagtgactctctctggcagagcctttggccacgtacatccggctcttttccgcctgcaggtgctcgtagaagggctcgtccagagcgaagctgtctatgaggtcgcagcccacgtgcaagctgtaggtctcgccagccacctgcacggtgacgttcttccactgcgagtcagccaggccgacgtcctccagggagaccacatgccgggtgccgtcaatccagtaggtgagatccagcgtgtccgcggggccgttggagacgatctcgaactgcctctgggagagaccggggccctccagagccaacagcgtgcccctggacttgccgtcctgcttgagctgggccgtgaggaagaagccctccttctgccgcatgatcttggtgatcttgctgaggtcatctgcgttcaccggtgggatgtagtcaaagcgcacgaagcggtaagccggcacgccggggtcgggcccgcggaactgcttggcgccaatggtcttgcggttgatgttgctgatactgaaaaggtcgaaggtcgtgtctttgtcctggtgaccagctgcaaagggaaccgcagtggagaagggtgacgtaggggaagagggcgaggttggcctgacccagggtgacaaaccagaacctcgcgtgtaaggaaattaacgaggcctcccaatatcccgcagcttctctcccttttttatgggaatcctggagccacctctgatgaaaagccactatcctccgtgccagtgccgctactcagagtgtgggcccaacgcagctgcgggtctgtggggtcagtttctgcccctggctggtcgaggagcgtgtgccagaaggtaaatcggtggagacaggcagcgccctgtccgttcagctggccctttgcatagcccgaccttcttggtgagggaatcccggcctcgcttgacatcctggcacatgtcccaggtcactctgtctggctcttccatctcagatctgaggctgaaaagcagccatcctgtctaccagttgattgctcaggaaaaaaccaaataaatgaataaactgggaaagacatggatctttagccttgctattgatagagtgtcagaaagcggctaaatcgtatgttgctttcttgttgagatcaactgcctaaaaccagttatgtcagcaggttgttattttgtaaaaatgtattctccaactcttaatgcaccctgtgggtaaggatctgaaagagtggtcagtatcaagtacagaaacaaatggttttaagtcaccacctaagctattggcaagaaaagtgatcagatctcacgaaaatcataatagtttaaataattcaaagccaggcgcggtggctcacacctgtaatcccagcactttgggaggccgaggtgggtggatcatgaggtcaggagacggagaccatcatggctaacgtggtgaaaccccgtctctactaaaaatacaaaaaattagccaggcatggttgtgggcgcttgtagtcccagctactcgggaggctgaggcaggagaatggcgtgaacccgggaggcagagcttgcagtgagcccagatcacgccactgcactccagcctgggtgacagagcaggactccgtcccagaaaaaaaaaaaaaagtaatacactgaacagaaagtttagccaaagccttccttttcatctaatatttagcaaattagaacaggataatacacagggttgctgacagaagtgggcaatggaccactttccatagagttacttggcaagaattaaaagctttgattcagcaattctaattttgtaacctatccaaaggatataatcacaaatgctacttaagatttatccacgtcaatattttttgtgtcatcatttatgctaatgaaaataaaccaatctaagtgggaattgattgaaaaagatcaggctttatctgtgatgaaatattatgtggtcattaaaaatcatactgtagaaaagtaaacacatgggaaaatatttaaaggaggaagaaagtggagcaaaaagaattcaacaaacaccaaatacttgcagtgttgtgaacatcctctatagaaaaaaggataaactgtgcaactctaggtggaattgcatttttctctaacacctgaattttccaaagataaattatctcatgtcatattggctcagaagtaagttactatttgatttataaaggagctagaaggtcctcacgggtaagattgtccaaccacacactttattttgtcatctctccccttgcagctaagccatatctcacaagccagagagagaccacaggctctgaggacactcaccttgcgtgctgggccacacccacagagccagcaggaccagcctccagaccatcctgcctcctgcagctgagctcctgggaatacaggaaacccttgttagtgatgagtccacagctgcaaccctgcctgtgagcgagactggcccagtgactcacatgaccattgaataacagtttgcatataaaactcagcaccaactggatttgtggcaaactgagagcgaaggaggaaatttactcttcaagcaggattcttctaactataagatttgttgagctagcatttgccggcaagcactgcacatcacgttctaaatattcctattatttcatcttcataatagcctgggaggtatgtgctgctctaattgtcctcattttacagatgagcaaatggaagatgggcaagttcagcgcttgcctggagtaattctgttcatacgactcgtagacaggacttagatgtagaaagtttgaatttagaaaaatatccagcctgacaaaaataatctgtgaacgcattttgtgtaaatatccagcaaaaaacagttatgcataacctaattaaatagaatgaatatcaactgtaaaaaaaagttacaaataaacttaatttggtgaattatacttacaaaacaacagaacacttgacttagccatcattttgaccctgcctctttattttcctgcaggcctgtttttccattcttggggattttaagttggcacagctcagtggaggctggccccgaagtcaggagatgtggtccaaagcccggctgggcgattaaccctgtggatctcagcttctcctcttccgggcgagcatgagcctgagggtcccagggctccccaggtcccttccagcaattggtcacaccctgctctaggttgaagggaagactgagaccccaattcttcccatatttagaatatcaaaggccgttaacttctcattgttaatccaaggactctccctctccagaaacaacatttggtaacctggaaatcctcaccttccaggaatagagaaacattcctcagaagaagagaaatgcttggcagcacctgcagaccccccacccatctgctgctgggaccccccccccaaaccatctgctccccccagtgccgccccaggggtccttggtgattgtttcatctgtcctggctccggaagcagcacggcctgcggccggagtcagcaccaggctgagcaatgctgagcaccagctgtgcaacctagggaaacttacttaacttctctgtctcagtttcctcatccgtagaatgaaacgtagcgtcatgtaaaatgcccacctcatcgggttgtcatgagagatgaattcggcaaatgaaacttcaccaggggctgacttagcccagcgagccacaggcatgggttaccggagcagaatgtgcctctgggtctggggcgctttctactctaactgcccgaggcagctgcagtaataatggtggtgctgatagggcctttctatggagctcttaagagggtttaatgacaggagcgaacacttggccatgagcttagaacagtacctgcatgcagtaagcaccacagaacggtgttagaatacacagctcaggtacagccttggcaggctcttcccacctccccacctcatcagcccacactgccgggtacgtcgcagtcccctaaggacagctgtgtggggctggccctgcagaggccagccaagaacaggatggtaaatgcgaaagttctggatgcccagcttcataaggacaggttagaaaaactaaatcaaactcctttgacgaaaccagatcctactgtctctgccttgaggtagattcttacaagagcaggaggctaacaaagcatcccctgctgcggattgtcaaaggacagtgaggctccatcccacaggaaggatgagcagccaggctacctggcctcagcccatccagggacaccgggcatgcatggatggagccacggatgagccagtgccgctcacccctgccccagcctctgcacgccacacatccacgtttatgcttgtgtttttccaaaagaaagatttcggtgcctgtctgcagcagaatgtagtttgaatttgcaaaggtcttttaaaactcttttcgtatgaacaatcaaagtaaaagatagctttgcagagagctaattgtttaccggccgtccaccaccaacagcagtctgattaaacaccagactcctgggtgctcagctcccagtcctgggcagccaaacccaccttccttaagtggtagccaggcaacctgccagctcgcttttcatatgcaaactgccccaagactgttaaaagtcgctgtgtgtcccggcagtcacaggattttccatagacttaccacaaatactctctagttatgttcaaaaccacttttcagctgctaataatgttaacaatcagagtctctctttaatctactaataatgttaacaatcagagtctctctttaatctactaataatgttaacgatcagagtctctctctaatctactaataatgatgttaacaatcagagtctctctctaatctccagttacttttcagatattccgggagttgtttctaattctctcctcaataacaaactctcatgtggaatcttcttcttcggaaactgaaaacataaagcgtttacccgggttcccaggcaggtatatacattgaaatagcagcagccacaaccctcagagaggaaggggtgcccggctggtgaaagcacagccacggaggaaaagctgaggagcggccacgtgccttgctcttcaagcgggcagtagaaacaccacgtgaagaaacacttgccatttagtgttaatagatacaccacccaccttaagttaagaatcgaaattgctcctttttcttctccgcttcttagagttcgagaactctaatttcttaaaattagagcaccattaaataattgattgagtttaagaaataatcgtacctggtttgccaaaaagatgcagtgatgactggtttcagtgttccggaccgagtcagaaaggcgcaggctctgctggagcgagagaccggccctgcagtgcaggatgctccggtggacgtggccgagcggctcccgggcagcgcggctttatatgccgcttctcctgtgcagggctgtcaatcagacacacgaggaagcacgtttaattcattccttcgaaggaatgacatcatcccccttctgatctcaccatttgctccgagtacctgctgcaggggtccaagtccagcccctctgtactggatgccgtctcctcctcctgcaccccggcccctgccagacaggcctgggaggagccagacggagagagggaaggcagggactcacttttcctgtcttctctcaggaaataagatgctataaataacactagcaagattggctagaactcctcattttgcttaagagaaaaaaatgcaagttctatgccttaaatatgtttcgaattactcaatgtgatattggtctttctaaaccaaatgagtgactctcaataacacatgaaatacatcggtgagtatcaataatcagtctgtatattaataaagttattatggtcaataatcaagtgtattatgtgacaaaaatgaaatttaatataaaaggaagttgccaacatttatctcaggcagttagaggactgaaaagctgtactgcagctttgggaaaattcatttttacccaaattctgcttcatttgctcagtgaggatcccctagaaggacgtctcccagtggacgtgcaatacccgtagaagggtgtgtcccagtggacgtacagtacccggccaagtccccttggtgcacacttgcacgtggccccatcacaggaacaacctgacgtgcaggcacagagcaaggactcgagagaacgagaagcagtggcagcagctaacccccgcccctcccacacctcaggcatcacccgcaatcagggtgcactctgcatgggggtggggggcaccgcttctcagaggtcagggtggacgatggatgcggaggggctgcttctcccaggtcagggtatacagtggaaaggggaagctgctgctctaaggtgggggttgatggtacatgggggaggggctgcttctcccaagttgggctggacagtggatgggggaggtgccacttctcccaggccagtgtgaaaggtggatggtggagaggctgtttctcccaggtcagtgtgcaaggtggctggggatgtgttgtttctcccaggtcagggttaatggcagacaggggagctgctgcttctcctgggttggggtggaccttggatgggggaggtgctacttccccaggtggggtggatggtgactggggagctgctgctttgcccggagccacctgcacctgcttcatgtcggcacctgcctgtcaggttccttcacgtttgtgtggagttgtcagcctggccatggatccgtcaagtcctagttagagaacattaaagcgaatttctgtggacacaacccttactgtgtctgtggcaggggagtgtctcttaagcctcctggcattcccccacaggggtccagcgctgcagaggtcggcaggcaccatgaagagcaagcctcactttctggcctctgtcttcagggaggatatgcgagcgggtgtgggagagggaaggagctttcatttgtgaaaacctctgtttttcctaatggcacctgtttatttatcacttggcaaacatcagtttccgacacatgcacagacaaaagcctccaagagtgtatgtgtcatgtttaaggtacgttattttgctttttaagctattagggacaaagtcatcatttgaattaaaaagtagtttaaatagattgatgttatctcaaattcaaaaaaagtataaaccagttccccttaaagaattttcagtggataattatccattcatcagtttgagtttttctgcctccaggttagtttttcctggggccagaacatggagggcggcatcccctactctgcgtgccacggcctctcctgttcctcagtccacagaatgcgtgtttcctgattaaagctgaagacaggcagctcagctgctcagcacttcaggagcatgcggtgaagaccgtgacactcactggggagcaggaaggtatgtattcatgactccacgtgccgatgggcaggtacagagaagatgggcctccttctgtaaaatctggcagcccagaatcagggaagtctgtttagaggagacagaaggtaagccgattggaacatggcccgtgaatggggtgtccccagttgagaaagtatttcaggcagagagagtgggtaggtgttcatggtgcaaagaacagcaggctcctggtgcggcacccaggccaggtgcatggaatgggcttcatagacgatggaagtcacagagagtttcctggcagggtgaggcgggacttcatgggcccactgtgcaggggaccagagggggagtagaggggacagcccctggtcagcatcttccctgggccccctgggggtgaggaggaagggagatgtgaggatgaaacaaaaagcagtcagaggcttcgtcaggaaagccagcgatgctgagggaagcatcatcacatgtgtgcgcgggaggatgagggacagacacgcagcaggtggaatcatgtccccccaagttcacatccaccccaaacctgtgaatgagcttactggaaataccacagtgcttgtggatgaaatcaagtgtagatgtcgtcgaactgatgtaggacaggctccaaatctaatggctagtgttctaataagaataaagaatatgaagacggagacacagggcgagctccgcttgatgaaagaggcagagaccacagtgatgcaaccactagccaaggtcaccaagggctgccagaaacaccagaactgtgggagacagggaaggggcctctgccagaacattccgaggacgtgcagccctgccacacactgcatttaaaactgctggactccagaaccatgggacaatacatgtgtgttgtttgtgatacttcatcatagcgggcccagggaactaatacaggcacaccttggagataccgcaggctcggttccacacctctgcaataaagtgagttgcatggatttgtgctttcccagtgcatataaaagggatgtttacactccactattgtctattaagggtgcaatagcattatgtctaagagaacaatgtgcatatcttaattctaaaacatttcattgctcaaaactactaaccgtcatttgagccttcaatgagccgtcatcttttcgctggtggagagtcttgcctcaatgctggtggctgctgactgatcagggtggtggttgctgatggttggagtgtctgtagcaggttcttagagtaagaccacaatgaagtttgctgcatctatggactcttttataaaacgtttctctgtagcatatcatggtttttgatagcagtttactcacacaataacttgtttcaaaattgatgtccattctctgaaatgctgctgctgttttttcaacttagcttatgtaatagtctaaattatttgttgtcatctcaacatcttccccaggagtgaagcatttcacaacatcttcactgggagtacatttcatctgaaaaaatcattttctttgctcatccttaagaaataactcctgatccattcaagttttatcatgagagtacagcaattcagtcccatcctcaggcccagcttctaactctacctctctcactcattccatcacatcttcagtgacttcctctactgaagccttgaaccctcagggtcatccctcatggtggggtttggaagaatcagcttcttccaaactcctgtcagtgtttatatttttccttttcccgtgaatcatgaatgtactagtggcatctagaatggtgaatcctttccagaaggttttcagttgactttgctcatattcatcagaggaatcactctctatggcagctatagcctcatgaaatgtatttcttaaatagtaagacttgaaagtccaaatgactccttgactgatgggctgcagagtggatgttgtgttagttagtaagcatgaaagcaacatcatctcattgagcatttccatcagagttcttgggtgactaggtgcattgaccaagagcagtaatattctaaaatagatcattttttgagcagtaggtctcaacagtgggtttgaaatatttagtcagccatgctgagaacagatttgctgtcatctagactttgttgttccatttaaagagcataagaataatacctttagcatagctcttaagggctaaagattttcagattggtaaataagcacaggcttcaacttgaagtcaccggctgcattagcctctaataaaagagacagcctggcctttgaatttttgaagccaggcattgacttctcctctgtagctatgacagttggagatggcctcttctaatgcaaggctgtttcgtcttcattgaaaatcagctgttgagtgtagccacctccacaatgattttagttagatcttttgggtcacttgctgcagcttctccatcagcacttgctgcttcaccttgcatttttgtcttacagagatggcttcttccctaaacttcatgaaccaatctctgccagcttcgaacttttcttctgcagcttcctcatctctctcagacttcacagaattgaagagagttagagctttgcttagattaggctttggcctcagagaatgttgtggctggtttgattttctctccaggacactcaaactttctccctatcaatcagcaataaggctgttctgctttcttatcaatggagtgtattatatccgatgggcatatttcagtggaagccggatggatgagtctaaagcctgggcgatccttcattagagatgatgtttaaatccatgggcaggagacaggtgaggccactggaaagaggaaggcaggaaggggcagacagagccttagggcatggacctctggctggagctgaaccacaggtgtggtgagggagagggctcccttctgccccagaaactcctgtccctgaaccgtggtttccgttgtcaggttgtgcatggactgcgtcagaaacagcaaatcctggtgtggctctgttcctttcacagtgacgcaggggggttgaaaagcaactggacacattgaatgtgcagaggcctgagctgaagaaaagagcacgggctggggaccagggccaggcacactcgtcacagcccttctgactcagaggtttttatatcacctccccttgctcttctctctggcctgaacctgctttctaagcaccccaaggtgatctggggatacttgccggatgggcgctgcttggagcttgttaaaattatcaaaagaacaagcagacagacttcccctgcacggcttctccacctggaatgcgcacacaggacactgggcctggcccaaaggcagattccgactcagtaggtgtggggttggggaatctgatggtgggttttgaacaagctcccctgctccaagatcacgcttggagtagcaagactttagtgactgtaactcagcagggcactgttatcctggccaccaccctggggtgggtttgttgtcacactcattctacagaggagaaatcaaaggtcctggctctggcctcgccttgtcgacccttgggtcctcgggaccaggatccttccctggagaggggcccagaattcccagggccagggctgaggccagtccctctggctttgattccacccaagctgcactgacttggagcatacacaggaaaaggaatgggggctactttgtcgatttgtttgaggctccatttgctcatccatttattcaaaaattactcattgagcatctgtggcacctaacacatcccagacactgcaaacagcacagtacacatgaggcataaacaggtccctgccctttggggctcctatgtagcctggcctgctgcctaattgaattcccactaagcctcatggaactgtggtcatcagctgatgctctgtgtcttgtgtgactggagccccctacctcacaggtaaccgtaaggggtgagcaggaatcttctgctcatttctgttgtgcataaattctaattatgtcccggacaccacagattccctttcccaggtgttgtgcaaacattccaaggcacgtggcagggccttctcggacatttgtgtggcccccttcttcacctgcccagccatcactccccttgtaaacccagcgtggacctgagcccatgcgctccacatcaggaggcccaggggctgcgttcatggcccaggcttcctgtgggcatagcccaagccccctccccctatcccctgccctggagtggaggtcatccctggagtggagggaggccatgcctggagtggaggtcatgcctggagtggtgggaggtcatgcctggagtggagagaggtcatccctggagtggaggtcatccctggagcagaggacatccctggagtggagggagatcatccctggagtggaagtcatccctggagtggaggtcatccctggagcagaggacatccctggagtggagggagatcatccctggagtggaagtcatccctggagtggagtggaggtcatccctagagtggagggaggtcatccctggagtggaggtcatgcctggagtggagtggaggtcatccctagagtggagggaggtcatccctagagtggagggaggtcatccctggagtggaggtcatgcctggagtggaggaaggtcacccctggagtggaggaaggtcatccctggagtggaggtcatgcctggagtggagggaggtcacccctggagtggaggtcatccctggagtggagggaggtcatctctggagtggagggaggtaatccctggagtggaggtcatgcctggagtggagggaggtcatccctggagtggagggaggtcatccctggagtggaggtcatgcctggagtggagggaggtcatccctggagtggaggtcatccctggagtggagggaggacatccctggagtggaggtcatgcctggagtgaaggtcatgcttgagcaggtggatgtgtgtcacttcatcctcttgcactgagctgcctggacacccaattcatcctccctatcccaagagccccttatttcctgggtcatgcctgtttccctgctggactggaagtgccggtgtttcagacactgaatgtctccctcacttcccctctttgcctctcagcccctacattcacctgccctccatttggggagtttggtttccagattgtggagactttgatctggcccagcttgccttcctcctgttctgcatgggccatttggatgactagcttgggctgccttttccacctgctgagaccttttgccccttcatcacacacattgaccttgcctccaagactgccacagatgcgagtttgctggctgtcccctctgtggcactggtcactgacgggaatgctcatggccaggactgcgcacagagctcacggtccttctcatgccattctcaaatcgctgtcctctgtctgccttccctcctccctacgttatcagcaccgcaggcatctgctccctggactcagagtctgtctctaatcacagggctcagagtgttctatctcttttagggactcccactgtaacgggggatctttgggactgcacgaccactttagaaacttctggaataatggaagtttcaggaaatgcatctgcacagatactgcatctttacaaactgaaggtctgtagcaagtctgcaggtgccatttctccaacaacaagtgctcacttcatggctctgtgtcatgctttgtaattcttatgctatttcacattttttattattattctgtctgtgctggtgacctgtgatcagtggccttcagtgttaactaccttaattgtttggggccatcaacaattgcacccatgtaagatggcgaacaaaatcgatgaggattgtgtgtgctctcacttccccaccgaaggccgttccatctctctccctctcttccggcctccctcttccctgagatgcaacaatattgaaattaagccaattaataacctacaatggcctctaagagttcaagtgaaagggagagttttgatttctcactgcaaatcaaaagctagaactaattaagcttagtgaggaaggcatatcaaaagctgagacaggctgaaagctaggcctcttgctccaagcagcgcccatccggcaagtatccccagatcaccttggggtgcttaggaagcagattcaggccagagagaagagcaaggggaggtgatataaaaacctctgagtcagaagggctgtgacgagtgtgcctggccctggtccccagcccatgctcttttcttcagctcaggcctctgcacattcaatgtgtccagttgcttttcaacccccctgcgtcactgtgaaaggaacagagccacaccaggatttgctgtttctgacgcagtccatgcacaacctgacaacggaaatggttcagggacaggagtttctggggcagaaaggagccctctccctcaccacacctgtggttcagctccagccagaggtccatgccctgggggctctgtctgcccctccccacctccctctttccagtggcctcacctgtctcctgcccatggatttaaacatcatgtctaacgaaggattgcccaggctttagactcatccatctggcttccactgaaatacgcccatcggatgtaaaactcctccccgctccccaggaacagaggccaccccatcccaacctcccccaaaccagcaagtgtcctgatcactaggctccacaaggcaagacctctgcgtcacctctgattcttatccctccctggaactggggtccaatccatctgcaagtcccaagagcgcagccctggcccaggccccctccgtacctcctgcactcgtggccactactgcaaacccagggttccaccaggccccctccgagcctcctgcccccgcggccactactgcaaacccagggttccaccaggcccctccgagcctcctgcacccgcggccactactgcaaacccagggttccaccaggcccctccgagcctcctgcacccgcggccactactgcaaacccagggttccaccaggccccctccgagcctcctgcacccgcggccactactgcaaatccagggctccaccaggcccctccgagcctcctgcacccgcggccactactgcaaacccagggttccaccaggccccctccgagcctcctgcacccgcggccactactgcaaatccagggctccaccaggcccctccgagcctcctgcacccgcagccactactgcaaacccagggttccaccatcttctccctctggatcctggccatgggagtggtcagcggacatcctcactcagggtccccaggaagccacctagccaccttctgaccagcacaatcataataaaatggggacaagcctggggccctctcctagggagctgaggccacatcccacagagtgctcagaacagatcccagcctaacagcagagagaggtcagtggctcactagtgccaggcatcccaatcctccatccctgcacccaccctccgaacagcccctccccacacagcaaccacagggacatctgtgacggagaccccactggaaaaatcccccagggaccttccagtgcacttagtaagagctgactctcacagcttcctcccatagtctggccctgccccttccaagcttcccctccctcccagctgcccttctgtgcctcagatgccgtccttgagctctctgtccttctcccatcacatcctcagaggctgggtctttagtcacccagaccccaggcccaaaccctcctccaagggtcttctctgaccactggccccaaaacccccaccctgcatcccagtccctttctgggtcatttcactttttccttagcatctgtcagctggctgtctctgaggtcagctggctgtctctgaggtcagcttgctgaccatttaccacgcacatccggcttcttgcccaccagcatgagctcctctagaagagaatcttgggaccagcacccaaccttcctctctcggttgctctgcatcccccacacagagcagagtgcagcacagagccagtgatggacactggctgagggcatgagtctctt

SEQ ID NO: 422 - DNA, 174779 bp, Homo sapiens
gagtagctgggactacaggcgtccaccaccatgcccggctaattgtttgtatttttaggaaagatggggtttcaccatgttagccaggatggtctccatctcctgatctcatgatctgcctgcctcggcctcccaaagtgctgggattacaggtgtaagccaccgcacctggccattattatagtttttataggttagaggagatctctgaatctaatttttacaacatgattcacatgtttactgttttcagagcaagttgttagagaaggattgctggccagcaatgtaaatgttataaaaatgtttccaaatttaatttgcaataaatatctgacaattcattcacattttcaatgtcttatgaaaatatatttatatatgaaaattgcgatcataataaataattttccgaatgattaatcacatgttaaaaatttcaaagaatataagttcctctaaggatttaaaaataaactgtttcctttcaagaaagcataaggaccaaatttcttaaccttataaaggaaaaagttctttattgcttttaagtccttgatgaaagtcattcctggagattataagattattttcagaatgactttccttttaaaaactgtaatttctctttaatttctcactggaaaaattataaaaggtgcctcagtctggattacaaattgggaatggcgagttatttttgcatttctctctttcatatagatgttgcaaaaattagtcagattcagaaatctaccctaagctataaaaacactacacagtagcagctgtacgggggaaaagtatgccaatcatgctaatcatagattttctatgaggtgagagtagatgagggaaggagaattgctagactgaatggtgactgagtggcctctgctactgagcatttcaaaggggcagatataaccaagggatggggatggttgttattccactttcagtgtgtgcccgtctgactcattaactccctccatcccccaaaacttcagtaaaggcattcacacatggcttgggtcacggtacttcagaagagtacgggatgtcccaaagggtagtctggtgtggaaaatggacagatgagcagggggcatagaagggagatcaagctttcatcagaaacaagaaatgacagagaaacagaggtactcccacagcaatccctggagctactgagaaggatgttgaacttcttattgtacttgggttgatggtgagtcattcttgtctaaagctataaaaacaaggaatccagcagaggctggagatgagggcatccatttcctgacatatgggttatactgataacacctttctatacatacacacttagattgtagagttggtgtgtacctgtattgatacatacacaccaactctgagccaggccagtcactgttctccgagttacagttttcaaatttttaagatggtcacaccaccacctgctctccccatccaacaaggttttggaaggaaggaaaaggcatgtggaagcactttgtaaagcacaaagcataataatcattgtaaggcattaaaaggcagctctaggctgggcgccctggctctcacctgtaatcccagcactttgggaggctgagggaggtggatcacttgaggtcaggagttctagaccagcctggtcaacatagcaaaaccccgtctctatcaaagatataaaagttagccaggcctggtggtcacgcctgtaatcccagctactcaggtggctgagacacgaaaattgcttgaacctgggaggcagaggttgcagctgagatcccaccattgcatgccagcctgggtgacaaagggagactttgtctaaaaaaaaaaaaaaaaaaaaaaagtcagctctagtagaatagaaaaaaagtggaatttgaaaagtcaagtttgattcccaacttgtttgctttactacttgtataatcttcaagaggccattggtttctgtgaacctagtttcctagtctgtaaaatggggattataatacccattctgcttctctgctggtacctttacatagtaccagaggtaataatatgtaacaacactatgtaaacactcggggttcatataaaaataaggtatcaaatggtctttcttgcagacatatttaataaaaacctataataaaagcattcaaattttgttctatataaaagcaaggagcagaagcagagggtgtccccatgaatgaaaatttctcagaatatcattgtctttttgaaaagtagtagtgcactggactagatattacactgtgaatgatggctcactcacactattttacaaggattgctattaaaggaagtcatgtgatttaccagaattgttccgggctacataatattgaggacaagtcctgaattgaattatagcagtaggagcccacatagtagcattaagaatatagttccttacagtttagatcattttatgagacaactaatcaattttcaacaaatgcgtctgcagccactttcccccaaataatcttcattgcaagagataattttttcagaagtattaaaaaggggtaaggaaaatataatcaacctcagcagatgatcctaattcaaaatccattccatatgaccaactctgagatgataaaatacaacattttttagagcagcaaatgtttgcatttaggggaaaggggtttagagatcatacttacctcccttaaggataaaacacaacatagatgagaccagaaaggttaaaggggttacccaaagttagccagatcatggtagaccgtgaattgacccccagttctaatgaaaataatactagactttccagccaagcgtggtggctcatgtctgtaataccagagctttgggaggctgaggtggttagatggcttgagctcaggagttagagaccagcatgggcaacatggtgaaatctcatctctaccaaaaatacaaaaaattagccaggtgtggtggcctgcacctgcagtcccagctatctgggaggctgagatgggaaaatcgcttgagccagggaggtggaggttgcggtgagctgagatcacgccactggactccagcctgagcaaacagagtgagaccccatctcaaaaaataaataaataaaaataatactagactcttatgaattattttcttgtacaaagcagtaagatgtttacttacactttcctacacctaccccattcccgcaccactcatttcagaaaggaaatgcgcagattttctcctgtaatgtctgccctataggctgttgtgatagttagcaagagtgggagcctgtggaaaggcacggcaagagcagctgcataggtgtgaaccctgctgttagttgaaagtaaaaggactagggcttcagcactgtgcatctctttggaacttccttactgagccttcagacactctgaggtcggaggctgaagggagtgagccatgcttcctgcagccatggtaattctcagtttcagcctttgcacagtggcagctgcaacacagtcatctccctgattcaccctctgcccccatttttgcaataaaacatctgcttgaaaaggagtaaaccaggcaggtgagttggatagtgctcaaattacatactttaattgaatactcatttgtggaattcaggtttatgcaaggtattaaatcaggaggtaggagacaagagttctgatctctgcttcagtacttacaagccatataaccttgggcaagtgacttatttctgagcctcagttgattaatctttaaagtggggataataatatcttgtttgcttaaaggcaggggaatgaaacagaagcagctgttaaagatcccttctagattctagaaaattaaagacaatgtgagcgttcctcaagtaagggagtcatttttagtagtgtatttcttagatatgatctctgttatagagtataaataagttcacagctctttttaactattcaagacaactgttcagactagcaagaagtcagggtctccctcagctccattgttgacataaggtgtgcctataaaagtgctatgcagccttatcttcctcacacactcagctatttatcccgaagcaccccattaatgccaggatgtctaatccaaaaggagatttgtatcttcaataaagagttatttccgaatgagaaagatccatacttcctgcctctgtattgcagctagtgaatttgggtcactggtccattctcctgttgacttcagctgcgttctagatagcccctcccacatacaccactgtgtctgcaccataatctccgggagggaagagaaagcttcagtgctccttcttgcctgcagacttaattagggataatctcaaagcattcaaataatgtagcgtttcaataaggacagttattttgtcccagaagcctccttagtacctatgcaaatttgtccactgcactcccaagccaagttccctccccacaaaaaggcaacgggtacctacattccttttatccatcaagataagaagggacatcccaacacaaagatagcttggcagtcttcaccactaaacattgaggcagctggcaacaaacctctacctaaccagacaagttaagaaatttgtcactctctttagcattgatgtcctgaatctttttcaataatgagttttctgtccagttctctctatcttaacatagatgggaggatggtttctgagcaagtcaattgcagatctagaaatggatgtgcatgtccttgattctctatgatcattgctgttctagctatatattcaatgcagagcttgacattcaaacttgcataggcatcctctttccaaattaaaatggacccatcactcattagtgggggtgaggtagtggcagtaccaaaggatgtgtgtgggaagggcagcatatgtgcttctgtactctttatcagctgcccccaattaaaaacaattgataattctttaatatgacaaagggtactttcttaatcttaggtcaagtatgaacgtgggcaccttataccaagttgatatttgtaatgatcttgtcactccctgcttacgagcctttctccctccacaatggctattataatcagagtagaaaatgaaagcttttattaggcataagaagttcaatgtgaccagaacccagtgatgtagccatgacctaatcttatattactctgtgtctagcatgtaccagtctttaaaaaatgctcacattcaccaacacttcctcaaatgaggcttttgaatccacctgaaatttgcttctcagtgatttttgctttggctgactctttctaggcattcaggcttctgcttaaatgtcacctcctccaagaaggcttctatgaactcccatctgaactagttctactactcctgtcactccttcatattatgcaactgtttgtctatctccccccatcagaatgtaagctccagcaagaaagacactttgcttatgttgtttactgtatcaatcgggatccgatcaagagagaaaaacagtaatttcaacaaggaaagttcaatataaaaaattattacctataacagggaattggatcaaagggagattggtaagaggtaaagagagctctaaataatacagaaatagagatataaggaacagctacttactaaccctagggctgagatacagcatctcaaaaagagctcctccaagacacagacacactcttagggctggctgagatccagactttgctggagagggcacagttgtaactttctgaatagcaggagagccctgctagaattctgccttctggaacttgctagaaatccacattccagaactcgttggaaatccattctctggggttccaaggaaagctgctgagggaggtgactcattagaggcacttgctccaaagccacctaaggggcttctggaggaagctgctggctgctgggtgctgctgcttgctacctgtgctgtaggaacctgcccagtatgcaaccagagccaggaaccaggaaaccaaaccctttcctcctgcaatgtctctccagcgccttctattgacctagcttttttaacagctggaaaatatttaaagggctcagattcagtttcactaggcaggcaatgaggatgaatttggagctaagaggcaacatattaataatagccacttttattgtgaaatccccatattctggcacatagtaggtttaataaatatttggtgaagtaataaataaatgatttacatctaaccaaagtgaaaagcatgcttggcatatgtcacttcaagattggagctttcaggcctagcttttaacatgaaagttgctgccaagtgcctcccacatgaaaactctggaacaccccacctaccccccactctgtggtagggataagacaggcctccagataacatcatagcttggctcaacagttagcgagaagtgcaatgagagaagcacagcagagaaaaggagaaaaagtggccatgagccccacttacagtctgtgttacggctagggctgggccgccagttgctgcatttgcatctttctgagacattgaggtgagttacatagctctgccacgtggccaaaatgtgaaacacatccaagggctatattttaatacagaacttaaaaaataaagaaacatcttgacttctctagccactttcctgttgacacaaaccatcgagagagattaggggaaagatccttgctataagtgatctgatatttcctaacagagcaaagtttcctctttgtccactgaccctttcaatagttcttcgggttctattcttagaattctcgtttcctgtcctgagagaaaactgcacagaatttcaataaatatgacccaaatgatgtggaaacttcctataaggatgcaatgaggtattcattcattaatgccatcaacaaatatttactgagcaccaactaccagacagtgatggcagacataatttggggagtttggagtgcaactgtgaacacaaccaggtccctgttctcatggaacttgctaacattctggctaaaatagagaacatggaacttcctacagaggcactgtgggtgatttcacaaaccattgaaaagctctagtgggagcaagcaactaaccaaccttagaataaaacatggttgttgctggtgttcttagaaacttcgctgtcctcgtgtgcaaattgtatcactaaagtcttctcacttttgattcttgggaaggtttcagggcagggctgtctaatggaaatatgtaagcctcataatttaaaatcttctaggaacaaagttaaaaaagtaaaaagaggctgggcacggtggctcacgcctgtaatccaagcactttgggaggccgaggcggacggatcacctgaggtcaggagttcaagaccagcctgaccaacatggagaaaccccgtctctactaaaaatacaaaaaattagctgggtgtggtggcgcatgcctgtaatcctagctactcgggaggctgaggaaggagaatcgcttgaacccaggaggcggaggttgcggtgagccgagatcgtgccattgcactccagcctgggcaacaagagcgaaactctgtctcaaaaaaaaaaaaaaaaaaaaaaaaaagtgtgtgcctgcagtcccaacaacactggaggctcaggcaggaggatagcttgagcttcagagtttgaggccagcctaggcaacacaggaagacccccatcaatacaataaataaatagaaacagacaaaattaattttactaatatttttaattgagttattcaaaatatcacaattttgacataattataaattattgagctgcagttttttcacattaattttttcaaaatgccacatatatgtgtacttacagcacatctcattttgaattggacacatttcaagtgcttaacagtcacatgtggctaggtatggaacagcagaggttcagaaaactgtcaaaaggacttctctgtcctcttattttggggatggaggcgaaaatatttgccgaattgaaacattctgtgaactttggctctgggtttttagtatgaaattagaggcaggtgaagaccaccatagccttcctttgcaccagctcactacagtggccagaacggaaggaggttcacagaacgtgctaggttggacattaagtcaccgagtcatccactgaggaaagggatatcattaagaagaatagttttccactaacgccgaaccggcggcaccatctcaaccaacaggtcaagttacagtaggcaagcacgcatagaaataaacgtctaaaacccagcctgttacattagccaacactcttcttgactttttccgaattttttccctgtccccaagattagccgctcgctagaaaagactgcgagcctcagcagcctccccttgaactggggcgctgcctccagctggacacggactaaggatggaaaggcgcactgacggaggccgcccccatttcccaggcccctccctaggggtgcccctcctcagccatggctgcccctttctctcctcctccagcatctgcccctggggccacccccacctttccgccatctctcgggcccgcgtggcaccctgctctgtttttaacggggataaacttgacttgcttctccaaagagcgggaaaaagaggcgcagtcttggtactgatctgggggagggaacgtcccagggcgcgcaggggcgttttctacccgtgccccgtcggcctgctctgttcagtaccgaccgtgttcggggttcacgtggcccagtcggcaaagtttctttggaggtccagcgtctctgattcccggatcttcagccccacccggagcccccacggttactgccccccgcgacccccgatggagcgtcgggatgcgctttctctccgagtgcctccgggggtggagggagggaggcctgtttcggaactaaatggcaatcacagcccccgcggggcttggagggacgagctccccgcccaccccgcggccccggccccagccagcatctcgcgactccatttctggctctaaacaagaacggggaccgagtcgcgttcacacggaaaattatgccggctccagcggcgcgtaaaattgatgtgaaccgaacgaagtaagatcagcgtgatcctccccctcttgtctcaacaggggtttcggcgcgttacacaaggccgagcttgtctctttaaggagacattggaccctaattagtccgcattcctggcgcggctgcggagcgaggggccgaaggtgtctgggttgggagacgggtgggcgggaggacgagactcggaagaagatcttttgaccagcccccaggctcaccgctccctccaccctctttattttgccgccaccaccaccaccaccaccaacacctaattctgaagatgcagccagggcagcagcaacagcagcagccgccgattctcccagccccacgttactttgattgacagctgaacaaatgttttcccggttcgaacgctcgcgctaaggaacgtcagccaaggcgaagctccgccttgggcgggccatctccgccccgcctccgccaacctcattcctcttcgttaattggtcggagctacaggcgacgcccggcccccacgtgggtttcagctgggttggctcctccccgctggcttgccatttgtcagcagtgaaatgatgggcactaacacagaacggcgattaatgttcagccacctctgattggttggtggagacgcctaccgcaacgggggtgggcggggcgcttggagagctcgccagagcgctcgcatggcgggccggtgattgtagtcaatctggccgtattctcaggcagggtcgcccggggcggactacatctcccgggatgctgcgcggccgccccgcggaagattgtgaatatgtatcagaatgttaatgattagctgctgctaaatttggtcaaagaagtcacctacacagagcgtgttgttagagctgtgctgagcgggtgtttgggttgttggctgctttcttccccctttctcacacacttgtatattattttgaggtggtgttcgcagagtttgaaaggagagagaattaaaaaaaaaagccgcaagcgtttcactcttttatttttataatccccttcaatttggggttaaaaaaaagacaagaaaacaggaaggaagagaaataaggaaatgagatgtggtaaaagaagctaaaaggtgccttttaaaagatcgttgctgtgaagtgaaaaaaatctccagagaaaccaaaaagcaccgccgagacctcttccgaaccaaaggagtttgtgtttgcttttagggaagaagaaagatcattcattcggaggaataacaaccaattaaaagacaaataaaaaaagtttggagtgggacgcagagcgagcgagaggagctgccggcgggcggtggggcgcggagcccgcactttcccggccgggtgagcggcggccgcggcgccgggctcggcgggtgcgcctcggcggagcgaacgtcggagcgttgccttgggagacgcgcgccggacaatgcccgcggcgggccagtgacgcccgcggggaatgcggagcggcccggcagccggcacccagccgccgccgcgcgttcctgccgcccgtgtcacgcgagacccggcgggggccgggaccgcccgagccgcccctcagaccgagccggccgcctccgctgccgcggccgcctcctcttcggggtcattaaagccaatgagccgcgcgcctctgccgagcgcagccaactaaatcggcttggatgattcgcgacctgagcaagatgtacccgcagaccagacacccagtgagtgcgggcggcggggcgcgggctcgccgggtgctgggggattccccgcgtcgccccctgcgcaccgagttgtgtcttttggccggaggggcgtggagagccgcccgaaatcggcgccccgcgccgggagcagcccgcccgccatcacccccaccccccggcgcggtggccctcggagggggtgcggagaggcaattgagttgtagccattttcttattgttgtctttgaagcccctggaagccgcgccgagccgtttgcggtccccgcgccgcgactcctcgagggggggtggcgagcgatgaaggaggcgcgactccgcgcccgggcggggagggcgccctcggcagcggcgctgctgggctggctgcggtttggaagtgcggggcgccggcccctcgcgccgcgggccgccggggcgagcgggcgaacgaacgagccgagagggtggcggccgcctccctcctcccccggcctgaccgcagcccgacgccatggcgcgggtccccccgacgggccagtttcgattccgggtgaggagggagtgggcgcggcgcgcgggtccctgggtgcctgtctttggccggggaggggagacgggactcgaaccctcggggtccggggcgcgggggcctgcgggcgggagtatgcggggccccaggaccacctcgaaaccagcctctgcctgggctgttgggcgcgaggagggttgcgggaggagagttttaatctctctttgcttgcgtgcgcgatgaccctcaccccccgctaacgccgcatagtaggttttctccgtctccctgcttcgcctgtgatgtgggctaattaaatattttattgttgttcttcaggcaccgcatcagcctgctcaaccctttaaatttacaatttccgaatcctgtgatcggattaaggaagagtttcagtttttacaggctcaataccacaggtaacgatattgactttagctgatccttctgtttgcttagctcttgtctccccgacaaatacacacaaacacttaccctcctccttttttgtgggggcgtcacaaaggtattatttttttttctcggtgggcagaaagggcaaatcaaggcctccttccttaggcaggtgtaaataaattaaacatttcttctaccgtaaataaaaagaaggcagaacaatcgaaactggggagacttggaaaacgctgaggccaaactttcgatattgatttattggggccgggagaatgaaaggttgggaagattctggggccttttgacatccttggttctttattactccggacttgattccttctcacttttttctgccattccactgaagagctgagagcccagggaagtcggagtgagcgatttcattacttttatgctaaaaaaaaaaaaaatgttttcatcttatagacgatttttagacttagggtgcctttgagacatttttctttagctggctttttaatgatgcctaattcttatttcataaatgcaagaaccaaaacaaaccactgaacccgattgacactttgcccctgggtggtggtattcaacttgtctgtgtgttttggagggaaaaaaacaagatatcattcataagacatgcttgattcatattttcattaatctctttgtagaacattaaagaaattcccttgtgacgttttggaggacttatttgtgcttgtatgtgcagtcattattgaagtttattttcgtgtttgttttattaagtgaatattcaattctggaggaagttcctgaattaaactgattagaggatttgtttccttaaaacttaattaaaaaaaaaatcctaaaaacaaaaaaccacatatatgatccttattgaaggggcaagtccagactggttccaatcacccctttccccttccctttccataatgatgggggtatttatttaagattgttgatttagttgtttgtaggtgagatttagaatatgcgtttaagagttgaaggatgtaagttaagatcattgtacttagagtatcttatgtcttgaacagtctgaagctggaatgtgagaaactcgccagtgagaagacagagatgcagcggcattatgtcatggtaagaaaaccatgtcacagattcaaagtgcctattagtttggaataccaaaaacaagaatatgtttaaattgctgggggctgcaagatagatcacagtcaccctgccagtgcagttgaagttgtgggaatatgtctattagcaacctgtaattctaggctgttataacttgcctttgacaactggctttgattggaattttcagaaagttcagccacatggggtataattttctgtgctttgtttttacagatcgaaaaaaaataaaaacaaaaccttgtttgttttgtcacaagcaaaaatgtttttgtgttagtggctttctttgttgttttattgctcttgctccaaacaatttttgccagtttttctgtatgctgttaacattgtaaatgtcttattattaaagacattattaaaaaataatgttttatttctttgaaaaggagtgatggataaggaaagacagcagaccatttttcaaatttttttctctttatgttactattacattaatatttgtatgttttcaatttctgtagtgttatattggtttgaggaatgttgtagtctcctgtataactgatgtgttctgccagaatttctatgccagttatactacacgttcaaaaaaccagatctgcttttacagaagtattatgaagcatatttttatgattgtccaagaaagctccagaataacccactcatttatttttctatctagcttttttgctttgaatgtgtgaatatgagcagtacactaacaaatcagaaatcaaactctaagtagcatcaccttttccaaccttcctttcaaaacatcagcgtttgtataaggcattctttgctgttaacttgcctgctgtgcttaggaattaagagtccgtaggataccaaattttcatcagacttttttgatgcatctgcttgggatgtataaagaaactggagatgttaagaatgctgtgtttgaatttaatttttcttagttttgtgtgttttctcttagaatttgtgtcttaaggtggttaaagatagtgatgggctcttgatttattggcataggttatatgaagatactggtttaggtgaggcttttatgtttgtttcagatttacttggggcattttgaacaaactagggagattgtttgatgaaagtcatgcatttaattgcttttccttctttgacagtattatgaaatgtcctatgggttgaatatagaaatgcacaagcaggtaagttatttctttataaccattttaaatgacagtaatactgggacactatgaaaagaaaattgtatgttttgcagttttattctgcaagccgttgtggctacctgtatttaaaagtctgggtagtgaagaaaatgctgttttttcatgtgtggctccccatctttctttcatattatcctaatttttataatttaaaaatgttattttaaaaagtctgaatacatattaaactctgtacactttcaaaagcaggatgctaaattttaaaatcctcttgttattcttctgaaagagttgctttatgtattttgggcattgcaaacttgtcttgtgaaagagcttttcttggaaaatattaaacagtaaaattaaattgtgtggcgccttcgttggcttgatgtgaaagaatggatagagggtgagctgggaggatgaaaatgaaatctgtggagctacaaaagaaattgatgtaaaatccttgtactggtcccctgaggctacttagttgggtcttaccaagaactataaccgttacttccaaaatttgtacagagtaaatgagcctgataggaggatgtgataaggttcaacattgggtcttgaaatctagcaattagttcagtagcaaaaaaaaaaaaaaatgattagtcagaaagcactgagagatacgactcaaacagtcttctttttgtgcaggagactgaataaaatggtttggcttaaatttcctagacagaagaataatagcgggtatatctatctatatatatatatacacacacacaaatatatatacatacatatatatatataaatattgtttggcgatagtaattcctctaggaagcatttatttttagtgatctcctagtggaagcacttcaggtctcatcagccatttcagaataggtgtgtatgtgtttgtctgctgggaaaaagacaagggaaaacttactgcttttcatttcctatttatggtcaaggtggatgtcattactttctaagttgagaaaatatgaaatgagcacatactattaggccttcactatttatggattcctttttgggtatagttattttctacatgctcagaacatcccagatagtagatctttaagagatggctgttagacaataaggcaatctgatgaatagtattggaaaacaaaaagttggaaaaaaatgagacgttgcttacattgaggacttttaatttcagatactgttttactttgtatgctatttggttatgtcaatattagcattatagtatagtttgaatggcctgttgaaattaaattcttattttggcatctttgtcatttctgtttagattagtaatgtaaatatcttctgcttaaacaaaatctgttcaatcttgtggatggacttctcttagttctaccttacaggaataaattacatgagagatattgtttgttaattatcccattacatttcctttgaggtctggatcttgtgtatgtctctttttttgtctgcaccccactccccaaaattaattagtgtctttttaaagattggaccagatgattaatttagtccctttatttctccttctgtatcttgtttaccctaaccacttagtttccaggtctccttgtaccatctacatttctaagaggcacatagcttgtatttggctgtatgtatttctttttcgagggggtatgtgaaatcccttaattttacacattttatactgctataattctgtcatcttcttgtccagctagcctcaaatgccatccatttaaaattgagaacagtacattttccctttttttcgtttccttttaaattcaatcatatcaagaatcctgagggcagtttatcacattatgaaatacagacagccctgcaaaccacctacttattatattttctttctttctcccccttaagcatagaggcatatctgtctttatttgttttcctaggcagacagccttagttcctcttagcctctcttccagatgtactcgctggatacccttgtaatggaaagcagcaataatgcagggaagttgccctgcggcataattgggcctagttctcaagatcgggttaggtttattcacttattagatttgtgtctcgaagggttcaacagtaggagtcccgggagcccttggaagtaccctagtaattggtggccctgatatttgaaacctttgtgtattttttggttaacgttcctgttcttcttggctgctgctagccacagaatatttatttttagagaaatttttcattggaacagaaaatggtggttgtgatgcagtcatggctctgtgacttagcaaactgataaaaagataaaagtatgaagcaaagacaaacagggtggaggtcggtgttctccctcctaccctttctatgtggtgctcatcatcagtccccctgtgttgattctgatagagaactataaaatgaaacctatggggaatttgtcattctgaaatgaaagctaatgtaattagtaccaattaaagtacatttagtaaattggatttaatcttaattaagcctgcataatgttgccaatttttaacaattatgtttgagaacataattaatttaaattttggtaactgagtaaatagcattagtctggtagaattagtggattttttttttttttaaaggggaacttggtgatatgacgtggaattggaacataaaatatgaatctaaatttctggtaatctttaggattgatagagctaagcagatgaagcaaaaaaaaaaaaaaggatgaagtattctaggctataatgggaattaatgctgtgccattgtctcaagttctagcataaaagtgaagatgacaaataggacatggttagaaatggcacatgttttagtgtgacgtcttcaaaatggaatttttaaaaatgaaagaacataggcccttattccctaaggatttccctaagtgtatggtttttgttttttgttttgtatgagacagctgacccagggtttagttgttaagtttttttgctgattgttcttctttgtaaatacagtgtggcttctaaatgggttggtggcttctaaatggcacagtggggtgatgcatggagttgatagcattactaaatgctgcttcttcccatctttcacctgtaatgctgtcattaaagaagtcctcactgatggactctgacagcagtggttaccattctaaaaagtgagtattggatatagattaggaacagtaggtatgtgaattcaacctataggaactatatggagatgaacataccatcttttgaaaaggggagcatgagaacatctatgacttccttatagttagtattctacaatgtgaaagcttcttcatttgaattttagtaatcatcaggaaattttagaaatctaaaacgcatagaatctgaaagtaagtactgcacatttatgtatgttttatgtgtgtatttttatatgtgtgtgtatttgtgtgtgtgtgtgtgtatatatatatgtatatttaatcaaagcaagaaaactcctgtttcacttaaagccatgtaaattttattacgagacttgggccacaaccatttgagtgctgctaaaatattaattgaatagaaatgaaagggccttgccaactgataggatatcataatcatagcctctttggtcgatggtaaatgatgataaatgacattaggaaccttttagcaaactgtaataactacaaggagggaagcagtatggatttgcattgtatctgataccctctagtaccaagtggattgccaatactgcttgtttagcattttctaagggcaataagatattgatttctgacttacaaggaacagctctattttcaccattgaaaagtattgcaggttgttaagaagaaattgacttgaagaggccgactgctgcccatcatggagcaaataaagcaaaactgccgaagcatggtggagcagcgagacgggccctcagcaatttgttgctattaatttaccatgctcgacagcaaatcaatcggcatctacttcatctgctggagaaaatgctgtccagggcagataaaaggctcggcatggtacagagaatagactggattggccaaaagcaggctgcagttaatgtgtaaataagtgaaatcaaggccactgttgcagaggaagctgttgttaattaggttggtgttttttagtgaactattttagaaagcagctaggatttggagagtaagaagagatttattgagattgaagtaatacatgactggcatgacattctagccttgagtgtacttgaatctagggtgcagtaaatttatttggggacactgcttgctatgaagtttgttgaaagttcattttagaccacatttcccttatgataactttttttttcaaccttgccagttttttgcacatcttctgtcttattgtgtactcttagatttagaagagtagatggaggagtaggtgttttagtatggaggcacaaatgtgtctgttatattcttacccagtgcctttttttttttcagagataggtataattgaactcttgtataataatgagagtgaactatcatggaagatggggtgttctagctgaaagtaactaataaatgaagattttgctgacagaactttatcttgcttcagaaatattaggaaataacaatctagagggcctgaatagtgggtagatactactagattataaaatcttaaagatgacaagtgaaattttgatgtctgcataaacttcagatacaattataagactatgtgtgtgggggtgggaagggttcttgtgtttttggttttcattaaggtttaaagccaccttttctaatttaagattatttacacgctgataatattccacaattaatgttaacggagtgaagggtattggtggtgttttttcccctttacctctcatttgggcattttaaaataggaggccaacttcatttactcctgtttagtaaatctaaatgagtgtaggttttaaattagattttttcccaaaacccttcagaaggtctagtattagggcagttgataagtaagtggaagcaccttgggcaggacccagtgacctgtccttttacttattacagcacctgcacgggaagcagatctggaggatgaaatttaacctgttacagtgtgtgtatgttttagggtgtgtgttttccgaatactgtggggagttccctttttccttctcccatgatggattcttttgtctttctagagataccataggaggatatctggatttttcacctaaggcagtgattcttgagtgaaattggaatttcctttcaatagaagtaaacatttattatatatctggcttgcgcttaccactggtctgggcacactgccaaaattcttatcgttagttctcataatgatcctaagacagggattatatccaatcaaaagttgattaaacagggtcagctctgcacaaggtgatacagctaatagttggtggattcaggacttcaaataaatttatgtgggaggatatctcctgggagatgggtttgctatgggttagagattcaggccccagttcattcctgaaatagagagtccctgaactttaggctcatacgcagaacctcttgagttgggggattctctgcaactgcctagagtccatggatggctcagcctgccctctgcttgcagactgctttcagtgggtgagagggtgaggttgctttcactcggaatctcccacatgtgggctagggaagctgcttgcttatcaagatggaatttgcttcctccctaggcaacctatttctcatttgtttacaaacttgttcttctctttaacttttatcttttcctgtggcttatgagagtgcctacagacaaggggctgtttgttaatcaccatcttgtgggcttttgaagggggaagctgggaggggaaaatgtgatgttttgtagcctctttgtagtttagaaagaggttcgtcgatgcaggaaatcacacaactcagttttaaatgaaggcagatgttttgcttttactgttaaaagaatttctttgcagcattcaaacaaaaggatagttccttttcactgccccttaatccctgctggatattatttatttgtatttattattttgatgggcaaagttctttgtatctaggtatatatcactttgatctgtgtaggaatgatggaccggactaatgagctacatctctaggtgctgttgcagcactggtgaaggagacaatacaagcaccagcccattgttcttcacattcttcatttaatctttgctttcctagaatacatcttttttatttcttcttttttttcttgtgttataagataggtagaggaaaccagttgggaattaaatgtttaaaaaatgcatttataagttatttgtgtttgtttttaatgtggctttttttttttttttttgcctttgatgtgattcgatggtttggtttaccacttctggacagcaataatgtatttggtggctagagaaaagagggacagggatgtgagttctagaaggcactttcttgatccctctacacaccctcttaaaatgactccagcgttccagcaatggtggtaggttcagtggtcctatactagctaagttattaccagttttgtaagctgggctgttggagagaagcaggggggcagcacatttacgcatgggcaatggagtatttacactgataatgacagtttgcaaggcttaggacttgttcaaagtaagtatactgcgaacagtttatgaaattattactctaaagaggaagggcctcagaagttttagtcagaagcaagagttagagctgttttgtctttgccttagtaatagctctcagtggtagttgttttctatctatggagagggatttagctggcattcatcaccacaaatctatataccctctctcttttcattggaacttacccagcatttatgccaggctgttgctatttctatatcattgacccaaaacttatccctggagagctgcacgtgtaacccttattccatccaggggtgacacatgggcagggtgtggattttcttagctggttcatcaaataagcagaagagaagtactctgggataccccttaggtactctgtcctctggtgagtggatcgcactgtcatctcttttgaggatttgcccacacacatttcaagaattgtatggtggaggcagcttctgcgtttcacggaatgaaaggataacttctctcccggtgcgagacaatactctatccccaacctgggctggctgtggtgtgcttgggacctctgcagggccctgttgcttgcagcaacctaggcaaagtgagaggttggggaaggaggaggggggatattggctttttcatttcttagcaggcttatttaactcattattattattattattattgtaatttgggttctgtccttattttcgaactatgtattctgtttctgaaggtctgtggatgattttggttattgaatttgaaactgcaagaaaatataactggaaagaatagtcatagtagaaattataagcactagtactctgtaacaccctttctttacagagagcttaaggcattttatatgttctctttaatgttccttatgttctgtgaagcaggtagcaagcttggatccatgtatttatttaaatagcttctgtcagtggagtacccaacagtttgccaagcagtgtcattctactggcctcctttaatagataacactgaggcttaagggcttaagagactagcccagtgtcacagtcagggaggatcagcacgggggtggagataccagagttcacgcaggtcagcgaatgcgcctgaggttgcatagtgagagtcactggcagaagaggaaatagtaggtttcttgacttcccttccagggctcccttcgctgaccatgctgtttccaaacagcaaataacatgcttgtttctatgatgtgtttggctttctgcaacatgaggagcatggtgatgctactggcagtccaagagtgttacaccgtcatctctagtgagagatctgatctgtgtttgtgtttgaggacagctcctccctcccctcccttctaccctctcattgcctctgccctgcccaaagggagtctaggatcagcaatattgaaatataaagccaaggtccacttttagaaaagtgcttgataaaactggctatctggcattcctgaactgtaccatgcaaacacactgtgttagatacttacctgtttatttcctgtctctctctcgtgctagattgtaagctccatgaaaacaggagcttttattgtttactgctgtgtacccggtgttgagccctgtgcctatcgcatagtagatgctggtgcgcaataaaatatttggtgaatgagagaatagcagttagagctagccaagaatatgtgtgatttaatatttttaagggtatattaggttgcaagatagataacaaatactgaatctcaggcatacttaggtctgtgttgtctactagtttgtggaaaagtgacacttggaaagaggaagcaaaagcaaccgaacttgctgtgcctttgaggaacaagttagtatagctaaagtagaatgtatgtattttagtatgttgagtctgcctttttaaagatgaaaacatgaatcattccaaacagaatttaaaattcagtttgaacgtcactgtatcactagtcagtgtttatctgaataattcttttactattaataggtctgtgtacctgtggtttgaatgaatgtggagcaatatcgatcttgactatattgtgtgtttagctaacttccctgcaaatcagtaaaaaatgcaaggttttagttcttttcaagggacaaggaattttgaaaatgtcttaattttttttattagtagagatagtataacgttgttgaaagaatagtaatcataacagtaagcaattttagattgcttatagtgtcgataatatttcacttattcttacaacaatcttatgagattatagtagtagtattatttccattttacgtatgttggggctgagacacagagagcttaaatagcttgcttgaaatcagctagccggtaaaatagatcttgggtttgactcaaggtcagaacgctggtatgacagatatttctgccttattccagttgatatgtttggaatactccaccatcagcatacttactaccttcccccaaatgcttgactgattccggagcctcagattctagttctggccttgctagtcaccagctttgtgatattgctgagtaccgtacctttaagggccatgcttttctcatctttaacttagggcgtaagtgaacgcccagatctcttttagctcttttggttaaaatgaccatttcagtttggtttgttgctgtgatccagtgaacagaaattgaatttttttttttcagtcttagaaagtctcttttagcacttattttcagaatttttaaaatccaaagttacccaatgtgcctaggagtagaaatgtatatttatatactattaatactttattttttataaggtactttctcatccttttttttcatgtaaaccccaataataaagcattccccccgtcctgtggatgaacacagtgagacgcagatgttagatgacaaagttcttcacttaattagtaggtggtttacaattcactgattctcttatggccagcgttcaggctaaagtaatgttgacacagaagtagagcaattttcataaaacatgtaatataaaagtatatataacataaaatatatcagtatgtctttaaagtgattagtttttgtacttttcctttggcatatattagaaaacttaggctgggcacgtggcttacgcctgtaatcccagcactttgggaggctgaggtgggtggatcatgaggtcaggagatcgagactgtcctggccaatgtggtgaaacgctgtctctactaaaaattaactgggcgtggtggcgcatgactgtaatcccagctactcggggggctgaggcaggagaatcacttgaaccagggagtcagaagttgcggtgagccaagatcgcgccactgcactccagcctgacgtcagagcaagactctgtcacaaaaaaaaaaaaagaaaagaaaattgtgtgacttctgaaattgtatgaattataaagtgatccaataattttcttccaaagatgtgcaaagggactatgtagcagtttattacctgttgtgtaattagctccgggggttactcttctagaatctaaggtaggtgtcagtttctctagcttgaggtaaagcgtgtctgtaaactgtggcttacagtgagcttgacatctcaagtcctcaggactttcttgctttgtcccatcaaggaccctttccttagggaagataaattcattgtaaataaatgacttaatcataagtagaagaagggagaaatgtttaatcttggccttttggagtttataaatcaaagacacagtagagatcaagttccttcattaaagtgtagttccaaaaaggaagaatgtggttttggttttaaaaaatttttttatttttaatttttaagagtacatagtaggtgtatgtatttatggggtaaatgaactattttgataccggcatatagcatataataatcacattcgggtaaatggactacccatcaactcaagcatttccctttttttgtgtgggttagaaactttctagttatactcttttagttacttttaaatgtacaataaattattgttgactgtagtcactctgttatgctatcaaacactataccttattcattctgactatatttttgtttacagaagaatatgttttgttcactgctggtaccactagcacctaaaacaatgcctggaatatagtagaagaaatgaatgaatgaatgatggaacagctaaaggagtggtttaattttttcattttattgcatttcatgtagcatcacatattctgagtatcagccacctttatataagctgtcttcgtttctgagtgcttagggagggcctggctttatgctgagcaaaaaaggcctagataggcaatcagagagtgggagttcttatctcagtctgctacaggtccttgagctgctgattggcatttttaaaatttagaattggattcatactttgccagatgatttatttctaagatatctttcaactcttaacatcatatgatgtttaaatgaccagcttaaaaataaaattcatccctacttccattgctcggtactataggcatgccattttagtaagttaagttttaagataatttttataagaggaaatacagccaggtttttttttgtttttgtgtttgtatttttgtagaatctcactttgagcaatgttaggctattgtgtggacagctaaaacaatcctaatattgccagtgtttcacaacctagaaccatctgctgtgttgctttttttgcagttgtagctgcatcttcctggtccttctataggctaagagcacatcagtaagtacatatagttaacagatttttcatatgtatatcttgggcaagtgttagtgataataagagcagttaaaatttatcgagtgcccactggataccaggtaaagcactaaatgcttcagatgtattaatttgtttaatttgtaatcttttgaggaagggatctgattatccttattgtgtatgaggaaactaaggtaaagagaagctgagaaatttgcccagggttatatatagctggtaggttacagagtaggggtgtcaaggccaggcattctggcttgagaacctacattctggttttgaaccactggcaataaatgtctcataagtgactatggtaaacttctttgtttatccttgcgtgtgtgtgtgtgtgtgtgtgtgtgtgttttgagatagagtctcgccctgttgccaggctggagtgcggtggcgtgatctcggctcattgtgatctccgcctcctgggttcaagtgattctcctgcctgagcctcctgagtagctgggattacaggcccacaccaccactcgcagctaacttttttgtatttttagtagagacggggtttcaccatgttggccaggatgggcttgatctcttggcctcgtgatcccacccacctcggcctcccaaaatgctgggattacaggtgtgagccaccgcgcccggcctatccttgttttctaaatgaaaaaacaaatcgtctgcttctgtgttctgtacacagtgagcttaaatgttaaaaataatagctggtatcatttgggtattttgttttgcaaattaacacactagattagtggactcattcattggttcatcttttatcacagattctactgtttgtccgtggctggataaccacaggcctctagatatttttgtacctctgactgtgagatttctaaaacaggcatggcaccttcttttataaccacgtgtcacatgggaatgttcagggaactgtaaacttttgagtgcctgcctggggtggaggagagatggaggttcttggctgggtttgaaaggttctatatagttctggaatttatatgcataattgtgtaccttttttgtgggggcagaatccatagcccttactggttcaatgaggaaactggaacccaaacaaaagaattagggaggtactgtgctagagcagtggttgcaaactggagcagttcctttcctcagaggatgtctggcaatgtgatgatatttggggttgtcacaacttggagttgctactggcatgtagtgggtagagtctgggatgctgctgaacatctgcatgtacaggacagccctctacaacaaagacttagctggcctagaatttcagtagtgccaacactcagaaactctgctccagagagaagaaaatactattaaattctgttgcctttttatggcccggagagttataggtttggggcataatgacctctttgagtagagaaaggccaagtatgagcattgtctggcttctctagttaagtcaatttgagagaatcctttaaacgtacttaaccttttcaggttttttcctccctttcccatgatgataagcagagtggggttggtggtagttaagttctgaatagagatattacatgatcctttgtaatcttccttttcctaaagaagggaccgtgataaaccttctcggtgggagggacttttcacacttaagttcagcttctcactggaaatcagcttgatttccactgaaaacatccagatctttgtggtgctactactgcgcaaggcagaagacattttcagtggaggtattggattggcagaaatttctttatgtgagacccattagtcctgtcccccatcgaagtcactagaattagtcttactccttgtctaggtttttcagaagtgttgccctttattagccttcctttgtccatgctgggcattctcagtcattttaaccattctcctgagacaccagtctggttggtaccaagatgtatatgatagaccgggctgcctgagaattcaacgtgacgtttctggcctgattctacccaactgaggcattagggcagatcttattgcaaagtagcccttctgctctttctctttagggcaaagtacattatatttgtctttgtcatgtcctgatcacactgtaatacacaaaatggaaccttgagttttgtaagtaacctgagtccacaatatgggttcgtttttatttttgaatgtgtgggcgctgatcagtgaacctgttttacttggacttcttttcccccaacaaatttcactatgctgcgctatgaatgtgggtggctgttttaaaggcttttgattttgcgggggacagagaactgtttggaaatgtggttttacctctggctagcttggttaacccccccaaaatatagtcaacctaaagtggctagtgaaaaaacaatagcagttctgtagctgcttgtttgcttgaacattttttgggtgagctaggggaagacaaaacacttgtttgggcttcttaatgaagaaattgtgtccccaaaattccaatgtgtgcttcttaagcttccactcttctctaggttctgggcatggggaggtaaactttggcacccctacttgcttgtaagttttctctttacatttcagaggtgtcagatttaggagaggctgcttgtaagttttctccttatatttcagaggtgtcagatttaggagaggctgcggcaggcaaagtacattatgtacaaaaaccttccttttgtaatatgggagctcatttccaaaggctccatatggctagcctaggaggctcatagtaaagacctgctttagttgtaagcagagctgataggagggtttttttataatctaagcaataatttttaggttattttgcatcagtttaggatgcacacttgtgaggtggtatttatgccttcttcccagattagatttacaaatcccactttcttaagatacttgattttacattttgaatcatgcttttttgccactttctttctgtttgaggctcaccgtgcaaattaactttctaaactgaaatatttagcttctcaaatggaaatacctggaactggatttattataaaggttaagaagattataacctaaatacttaaacatgaaaaaagtaacttaatcttcatgagattgttttattctttcattgggagggttacttggttaagagccagtagtcctggtcacctcagagggaatgcaaaggctcttattctttcatccagctaatgttaattaacctcatactatgtgcaggttgctttgagggctagcagttaggaaaggtaggaggcttgcctccatggagaatctagtctttttacttcatttggaccactgtaaaaaatataaagcagtgcagtggatacacagttgtgacataggtggaagagaagggggtctttctggctccttgagtgattaaggatgctgttacggaggaggtgggcacagtttagtgagacctcagaggatggggagcacttaggcaggttgaaaggaaagggtaggattccaagtggaagccacagagactggaaactgctgtgcatattcaggctgtgtttagtgtttccagctttattgagtggtagaggagagaataattgggaatataggtttgggatgcattatagaaggccttgaatgctggtggtagtgcttgggctataaaaagaaagcaaaggggagattaatcagtagttggtcaagggaccatatctgttttgctaatttgttcagcagctagcatgaggcctgagaacaaatgtcagtgaatgttgttgaaacgatttgagtggagaggggcgtgactggagagggacagggtggaggaagtgaagtctgaactagggaagtagaactggaaaggaggaatccctatgacttgacatttcattgggtgaggagtatggaaatgcataggaggaaaggccctaagacattgatgtctgcagagggacagagtcatggtaccattcattgatagaaaaagatactttagaaggggagaacttggtgttgataatgctgccaggtgtggtacctaggaaggagggagtgaaagaaggaagaggaggagggaatgaatgagtttgttgcttcttttgctttcgttcatcaccttactttcatctctcctgccaaatttataatccttccaagaacctcaaggattctttccacatcttctgtataccacagtggactttgccaggcagccttttgtgggcatgtgttttaggaactatttgacgtttgtaggagtgtggaagagagtttcttcttcttcttcttctttcttctttcttctttcttcttctttcttctttcttctttcttcttcttcttcttcttcctcttcctcttcctcttcttcttcttcttcttcttcttcttcttcctcttcttcttcttcttcttccttctgcttcttcttctttcttctttcttcttcttcttctttttttttttttttttggaggcagggtctcactctgatgcccaggctggagtgcagtggcgtgatcatggctcactgcagcctcagcctcctgggctcgagtgatcctcccacctcagcctcctgaatagctgggactaaaggtgcttatcaccacacccggcaatttttgtattttttggtacagactgtgtttcgccttgttgcccaggctaatctcaaacttctgagctcaagccacacgcccacctcatccttccaaagtgcaaagtgctgggatcacaggggtgagccactgtgcccagccagagatagtttctgtcattttgctcggttactgccattacctttatatagacatagtggaatttgtaaattcaattgatttttaactttttcgtctgtaaaggatttttaacattagaagtaggtacagaatactcaaaattattcttctatcattgaaactctttgttgcagtcattcttttcttccattttttatttcttgtatgacttggccaacaactctggatatcagtgattgtgtatcctttttaagttgagaaatttcatgtagacataaggctgagtcaataattgtcttgggcaactactgtgtttcaaaagaaataattattcccattgttcattatgtccctgatgagctaaacactgaaattacaatagatgctttagtcaatgtgaattatttgtgtgtggttaattttcttctttttttctccctaatgtgaggcatattctgtattttcaacctttaccccttttagacacttgtcttaagctgccttggttgaatgagaacagcagtgatagtaaggaaagttaagatgaaattaaaaaggccatagagtacatttttggtaaaccaaaatattgcttggtggcataaagccacagatccattccaaaaaaaaacgaaaaccgaaatgtggttttgctgtctgtcatgcagtctgtttcaactgtcagaaacatacgttgctttatgggatgtttttttcaagtctgaccgcagcttttaatttccttcattccacccacacctcctaccacacacccatgtatctagtactaatttataggcaatttgaatctaatgacataatcatcagcaagcaaaagggtcagcacttgtggcaaaagtttctttcttggtgtgctaattatcagttctacactcttggaaactctaaacagtcagaacacagtgattgtccttgttcatggacttttcagtctaagttagattgaggcctttaaaagatgggtttgaagtgctttgtatttttgctaaaaacataatattaaagaaaattaaacaatattcagtgaattttagaaagcaaaagaaagaaactcactcatgttcctacagttgtgccttaactgctgaccaggcagaggcatccctgtgtctccatcatatatgctgtgtctgatggagatcatgtcacccaaatgaaaaaatacttttctagtctaggttcaaagggtgatacataaaatacataccacaaaaaattaatgatacaatgaaacctcagatctttaaaattattattgacttattggtaactttacagtttcttcaactccttataggcaatacgatcctaaatatttttaaaaatctagtcctaattcagccagtaacttcctgtgacattggtaaattatttaacttttctgagtctcagttcctcatccataaaacaagggtctaggactggatttttactttttataacatgttggttcccaggcccctgatctgggccttaggcatcagtatttttctaaaagctacagaggtgattttgatgtacagcaaggttgaggaccagcgaactagagcagtgctgctcaaaattcaatgtgcatacaaatcactgaaatcagattctgtttctgtaggtctgggttggtgcatgatactctccatttctaacaaaaagatcaggtgatactgatactgctggtccactgaccacattttgagtagcaaggagccaaaacatctccaaaatgtcttccatttctacattgtatctccatggtatagtttatatagttcatgaagtctgtgtgctgcttgaatgagatctcacatttagtatgttaagattgatagtgtattatcttattatctgcacaacctctctttgcttaagctccatccagactcatgcatctttatttttgtttttgttttgtatttttttttttgggagattcatgcatctttgaaacaattcctcatattgaagtcattttaatagtaccttgctttagacagcctgacagctctagctggtggctggtgggttgttatatttgctgtagagaagagggttttcatttctttcttcttcgttcactccactccgacagatacttaggcttttgtattgtcacctttcctctcttcaacaggtaccctccccatattgacctcttgtattttggggtaaatgggcaaaaagaatcatgaagtgcattttgttttaattttgttctcatgcatgtacattctctgcagaaaatttattaagcgtaagtttaagggagcaaaactccaacttaaagctcaaacatacttaagctgtaacattttttaactctgtactttaaccatatcacttggcaattgtttttagaaataagaaaatactatttatagtttgtggttctttatttttgtttgctgcagctcaatctcacattggcaggcatcatgacccagtagaaagacccctgaatggtagtgtctggagagctgatattctaagccttcacccacccttaagtagtttttgcaactgtagacacttgggttctgtaagtaaaccagggaagagattaaggaatgctccatttcttagggctgtgttggagaatttggttaccttggaagaacatacctatcacctaaagtctaaggcaataagaaattatagtttgcgattggggaatgttgcttcggagcagtgacactcagagagtggtccatggactggtgcaggtctgtgaactatttcttaaagatgggtgaatgagataaggtacttgttacttgtgcaaaaattaactcactgttttcttcatagagaatgtctttatttttaaaaaacaaaacaaaaaactccattgaactaaacgtagttaaccgttatctttttgctgatcggtaacaatgtgggaactagctactttctgctttagaatacttaatcggtcaaaagttgtatcaggttattttataatttaagaatagaccaaagtagaagttcataaaatgtagcctaaaaaataaaaaagtaaatttaaaggcaagttaggttaaagataagaatcaaattcaaggtggtctggacgtatgtagcatagttaagtccaaggcagttaacacaggttcacaagtagtagcttcttacagaagctgtaagaagcactgcagtttgtgctttggttaatgcaaaacttgtttaaattcttctgagtgcttctaaattatctgagagaatttttgtttttcattttttgccatctactttttttttttttttttgagacggagtcttgctgtcacccaggctggagtgcagtggcacgatctcagctcactgcaggctctgcctcccgggttcacaccattctcctgcttcagcctcccaagtagctgggactacaggcgcccaccaccacgccatgctatttttttgtatttttagtagagacagggtttcaccgtgttagccaggatggtctcgatctcctgacctcgtgatccgcccgccctggcctcccaaagtgctgggattacaggcgtgaggaaccgcgcccggccgtttagtatctacttaatcgaagagaacatacctctgtaagtcacaaagaatttttattctgtagtcttaaatttcaggaccatgttattgtctgagaagctttaaaattaagcctgcctcgcctcctcctgcctgatgatattctttatactttactactatatataaaattcactgcatctagggcaagtatctgttcaccaagaaaagaggaagggagatccttcaccagtagcaaaacataaatactgagaatgtcttttctgggtaaaagtgcaagaaaagtagaaaaacagcaaattttctggggctaggcctgtgagctcactccttccaatcagtgaggaggcacttgtcttctgccactgtaccagtgagtctggcatccccatcccactttagatctgttccctagccacctcatggtccttgcagcccttcccctgtgtagtataaattagtaagggatgctttcttaattgagagacagaaagagccctaagcttgaatcgatacctaacaatacagccactcaatttgtagcactatctaatctcagttctgtcttaaaacagaactacttaccttaagggattttattcgtaagcctaccctcataaatatttctgtcagccagatatggggcagccattcttcccatttcatgattatagaaatggagtccagaatcattttggagtttgcttattaaagtcatggtttagctagtctagaaattagagtcacactaggatttgggactgcacagctgtatagttcgtaatatttggtgttcttttcagaatgttttgtcacttgattctgaattcttcccatgcctttccataattgtcccctaaccaaatcttgacacgagcctgtgatttccctattttaatgaatggtaggaagcaccatatcatccaggttttacacactggaatcattgattccgtactcccctggttgtctaatctagtgaagccacatagtctgctagttctccatgtgcagcctgcctcctttccttgctctcaccacggtcaccatcactgaccatcagaccttgttgtcatactagaggctatggtggtctccaggctttttgtctgcagcctttgccttctctgttctcttatctgggcttgctggacctcccggtctacttttatatctaccttttggtgttgggtcattttttagggtcccttctctgaccttggaaaatcctaccagtatttccaatatggctctgtcctcttctctgcttactttgcccttttatttaggtaattttattcactctgagtagatgaatctcagggttttttttctactagcccagacccttcctctgagaccattgtatgtcctcatttgccttgaatgtctcatagatacttaaactcaacaggtcccaaaatgacatagtccccccacaagcctgcttagtgattcctatctgaggaaatgccaccaccatccacccaatttctcaagccagaaacccatagaggcagctgattattgtccttccctcttattcattagccacacccagtcaaacatgaggtcttctggtatcaactcccagttactcttgcatttgtttacttttctccagctatatgatcatggtaaattaaccactgtatgattctttggctttatctgtaaaatggggacgagagtaatcctcttaaaattgttctgaacattaagtgaaatatctggcacagagcaagcgttccatgaatgttaggatggtgaacacccttggccaccatatttaaaaggactcactggcctggcgtggtggctcacgcctgtaatcccagcattttgggaggctgaggcaggcggatcacgaggtcaggagatcgagactatcctggctaacacggtgaaaccctgtctctactgaaaaagaaaaaaaaaaaaaaaaaaaaaaacttacccaggcgtggtggcatgtgcctgtaatctcagctgctcgggaggctgaggcaagagaattgcttgaacccagggggcggaggttgctgtgagctgagatcgtgccactgcactccagcctgggtgacagagcaagactccgtctcaaaaaaaaaaaaaagaaaaaaaaaaaagactcactacgagtaatgcaatagcctcctaactggtatgtcctggatagtgataattctggtccactaggttcttttggatctacttctccaccttcaccttgtgctgatactaccctttcacttttttatttgaacgtcagtgtcccatgctggtatggcaggctttgctgggaatggtcttacccttttctctgcccctttctcctttgtgtgtcagactcattttaccctcagttactcagggaaatagtcctctaaaaagcatttaaaaataccctgcattctgtatttgtttcaatgtctgtctcatttgctagattatggactctgtaagtcctatcttgttcctgtactgtttttttcagactataatgcagtatatggcagagtagcagacaataatcgaaagttatgaaattaatatggctcacattactctctccccaaagccagaagggttttcttcccctcctcactcttagatttccagggctcctctgtgtagtagctagggcacttaacacatggcgtttgttattgtgtttatttatatttgatcttccccccccagattataaacacctcgagttcagatcagttttgcattcagaactgctgtttctaccagagcttctagtttagagtaggagccagtaactgaaaacatcttgttgaatttcctaagtctgaggtgctttggaaattcattttgttcctattctgaaattatctttcatcctccatctttcctcttgtggtatgttttgtggttataaatctcttctttccgtccacaacattaaatataatcagtgccaagaggaggatggaggacagaaatgcactgtggtgtcttgacctgtctggtacttatcataactttcctaggaattgaccttgatgggcccttactgccttctaaataaagttcaaaccccttagtgtggcattcaagaccttccatagtctgaccccagtgaacctcttctgtccttattttccactctattttttattgcatgcatcctgtgctctagcttaatggttttcaatcctgcctgcacattagattcacctggggagctttaaaaactgaagccagggtcctgtctttggagattgtgagttaattcgtctggagtgaggcctgggtgtgggtgtttgtgaaaggtccactagtaatgctgatgtaaggccagggctagaaactactgacaagctcagtgtttcccacggaatatcatctcctctccgaattttgacgagaaagggtcccaaagtcaaagaagcttgagtagtaattgcttttaatgtgctcctttccaaagatgtacaacgaacactatcaaatgaaaggctctaagatacccaacagtaaagaaaactgtttaactttcttcatagtgtgtgaggtcgtctgataagagacacttttatgtatataatacttgttaataacatctgcaacatgtggtatagaaaatgtttttagccacttctcaacttttgagtcacttctttttttgtccttccctgatcatgtcatccaaatcagacccacctcctgccccagggctctctcttacacccccaattttgtcttcatagcacttctcagtatctgaaattcctctttatatacttgtatgtttgcttctgtctccctccacctatgatgtgagctccatgaccgcagggatttacttgtcttgttcacccctctgtcttcattcagcatctacaatagtcctgacaaatagtaagtagatatttaataagtatttgttgaatgggcaaaaatacacgggcagtaatgcattcgtggtttaggctttttctaaggtgcatttgtttaaatattttaaattgcctacagaatttaatttaaaagcaacctgaagtacattttaaaagtaactaggaatataggaacacaatagtttgctttacctttaattttctcaacctgcctagtcaagtattaaaaaagaagaaaacaaacaaaagtggatgtgagcctgattatagggaaaatgctgttatttttctgattatagagagttttcagtttgtggttggggacttgttttttctgatttctcagcctgtctcgggtggcttcccccagccattgaaggaacttgagtgaggaatcagtgaatggtagtggactttgtgtgcagtacaccaccccaacaacaaaaacacacaaaaacagacaaggaattaatttcagtaaaaacttcctaataattaaaaccctcctacagtgtgagagtattcagacaggtttgtcagggacagtggggaggcagtttgtgtatcagaatccgtatgtggaatcccaagttcggttgcctgctgctcaacacgtgatgctgcagcaactcttggaccttgttcagaagggatttgaatagcctgttctctctaggggtcctcatgctgcagctgtgcccatggctccccaagcctggctctaactgtgttgttttgagcagggttaataagcacgaactcgtctacacattgtagtgtgtataattcctgagctccaccaccacaccttgaattatcaggaactgaccttttacttcctgtggacctagtgatgccgtcgcatgagtaggccctttccttgggctattaaaatcatcaagttggttcactcgagataacattatagagatttctcatgaacgctgtatacaaggtgctctcctagggtgcttctaacaaatccatcagtccagtgggtcaggtgatcagcaatctggtataaataatctcaagaaggaggttgagctgcatttcctttattatattttaaaataatctttaaaacacatattttgccaaggtttcagataggaagctttaatcatttattcacccatcaggaattgtccagaatgaatttgcatttccttttgttgcacactatgataatttattattcttttgaatagcatggtatcctaaatgccagaaaagatgtgtgatgggaaactaaataaaccatatcagaatttaagcaagttttctggatagatattcctttatggttgatatattaatgtgctttagctacaggcataccttgttttactgggtcttgctttattgtgcttcacagagactgtttttcacaaattgaaggctgtagcaaccctgaatggagctgttcttccaatagcctgtgctcacttcgtgtctctgtgtcacattttggtaactctcacaatgtttcaaactttcttattattactttatctgttacatgatttgtggttagtgatctttgatgttactattgtaatagttttagagtgccgtgaactgtgcccccatcagacagcaaacttaattaatgtgtgtgttctgactgcttcatgctattcccccttctttccctctcctcaggcttccccattctctgagacaacagtattgaaattaggccaattaataaccctacacgggagggcctctaagtgtacaaatgagaggaagagtctcacatctctcactttaaatcaaaatctagaaatgattaaccttagagtggaaggcatgtcgaaagccaatgagccaaaagctaggtgcgttgtgcccaacagccaagttataaatgcaagtaaaaagaagttaaaggaaattaaaagtgctactccagtggtaagaaaatgaaacagccttattgctgaaatagggatagttttagtggtctggatagaagctcaaaccagccataatattcccttaagccaaagcctaatccagagcaaaacccctcactctcttcaattctatgaaggctgagagagatgagaaagctgcagaagaaaggtttgaagctagcagaggttggttcattaagtttaatgaaagaaaccatctccataatgtgaaagtacaaagtgaagcggcaagtactgatgtggaatctgcagcaagttatctagaagatctagctaagatcattgatgaaggtggctacaccaaacaacagatttgcagtgtggataagacagccttctattggaagaagatgccatctaggactttcatagctagagaagagatgtcagtgactggcctcaaatcttcaaaggacagacagactcccttgttatgtgactaatgcagctggtgactttaacttgaagccaatgctcatttatcattccaaaaatcctagcgcctctaagaattatgctaaatctaccctgcctgtgttctataaatggaactacaaagcctgggtgacagcacagctgtttatagcatggtttactgaatattttaatcccattgttgagacctactgctcagaaaaaaagatttctttcaaaatattactgcctattaatggtgtacctagtcacccaagagctctgatggagatgtacaaggagataatgttttcatgcctgctaataattctgtagcccgtggatcaaggagtaatttcaacttttaagatttactatttaagaaatacattttgtaaggctgtagctgccatagataatgattcttctggtgaatctgagcaaggtaaattgaaaaccttctggaaaggattagccattctagatgccgttaagaacatttgtggttcatgggaggaggtcaaaataccaacattaataagaatttggaagaagttgattccaaccctcatggatgcctttggaggggttcaagaccctgaggatgttctttgggggtggaccttgaagatgtgactgaattgctgcaatctcatgataaaacttgaatggatgaggagttgctgcttatggatgagcaaagaaagtagtttcttgagatggaatatacttctggtgaagatgctgtgaacactgttgaaatgaccacaaagaatttgaatattacatcaacttagttgataaagcagtggcagagtttgagaggattgactcctctgaaatttcaaagaaattctgtgagtaaaatgctgtcaaacagcatcacatactacagagaagttctttgggaaggaaaagacccccagtgctaacaagcttaattattgtctgtttttgagaaaatgtcatagccctccaactttcagcaaccaccaccctgattagccatcagtattgagccaaaaccctctgtcagcaaaaagatcatggctcactgaaagctcagataatggttaacattttctagcaataaagtatttttaaattatggtgtattgtgtgtgtgttttttttaagacataatgctacttcacacttaaactatagtacaaacataacttttatgtttgtactatactgtagtacacacatgtactgggaaaccaaaaaatttgtgtgactcgctttattgtagcattcactttattgttgtggtctggaactgaacccacagtatctcttgtgtatgcctgtattcccaaacaattgtagcgtgcctgcaaaagaattcatgagattctaaccacctaaactgtagtttcttctatttattcaacaaaagcgtattgagtgtctttgacataccagccactggggctataagacaaagctatctgccatggagcctacattctctagaaccttactactaggggtctggtctgtggaccagcattttcagcatcaccttaaaatttgttggaagtatagactctgaggcccttttccaatttggattttaacatttccaggtgattagtatgtgcattacagtttgagaagcactagtctagtccatgtaaacaaaaatatatatgagataatttcagatgattacagatgctgtcacgagaagacaaaactataatggccagagagtgggaggaggacgagtaattgaggatggtaagtgaaagcatcagagggagtgtcctgtgggctgagacttaaatgatgggtggagatgagccatgggaagatctggggaaggtggttccaggtagagggaacagcaagtgcaaatgctaggaagagggactgtctccttgttccttgctatgccctctgctctagccaggccagggcccatttattcacttgctgactgtgcctgcacctgaaagtgtggtggaagtgtaatggcagagtggtatctcagtaaacaggaaaaggccaaaacttgggttttgataagagcagctactcatagtgagaaaacaatcaaagggattgtaaggatgttttggtaatgacagcttcaaagaattggaattttatataattgggaggagggagaagaaaccactagaggccatatgctggaattggaagaagaggaaagaaaatactgagaaatgcaggatagatggagatttcctgaaaaacagagaaaagaagtaaacagacaaggaagctttagcctcgcctgagaggaaagaccaaaaaatagagcatggctctctgtataaaaggtggcttgtttccctgaaggtaggcatccttgatgagaactgagtaaggacgattagtctgttttgttttgttttattcctgtatccaaaattcctttgtctttaggtatttctcacatcattttgatcatacatatatgttgggaaaaatcaagatgaataatctccgtttactctgggaacaaggagtatcttcttccctctactgtggctaagtatggaaaagcttaattgtaaatcagcattcaaagacaaccaaacatttatttatgtcagtaggaaagaggaaggtgtgtgagagagagaaggaggaggaggaagaagaggaggggagggagagagaagagaaataaaatgtaaagcaggcagctggcaaggcttgctctgacacactggctgaggaaagagctattggtagaacttggatgtcttagtaatcagagtaatcaggttctctgaccggttccaccttgttctgtgcaggctgaaagtaagctctctagagaaagtaattttctttctctgctccttctgacatcccacttttccctcccatccttcctttctattttccctgcctctcccctctggtagaactgagtataaccgtggtaacattggttacagtgttttctagacttgagaactgaaatgatttgaccttgtacaagtaactggatgtctggcacaatgatcgtcattctcaaccttgataatttatctctctcgatcactgttaacattggagcagtatttaaacacaataactagagcccagaatatgcatgtaggcgaataggcacctatctaggatttctcttaaagatatacctctagagagctcacatggtaggaggaaaaagagggtgctcttttttttctttaaccattgtaaaaatgcttcagtaaaatatagcttgagctctggggatagactggaatagtaccatgaaatgtgggtataccgtgattctcttcaagaaggactttgttctgcttattcccacatgagcaccacaaacagtagccccatgtatcttgttaggacaaataaatgggacacttgagaatatccagttaactgagccgcacattgggtactttaaagcacacttaacatgcagtaaaatagcataaatatgagttcaaaacacaaaccaagttgacattgcttgtggtatcatcattagtagaatcattgctttggttaaactccctgggggaagcagtggaagggaggtatgggggttgtgaaaagagattcaatattgacactttcacattgtttaagatgatacaaattaactactctgttatagacagtatccttttctcactggagtaagtaggatgggcagagcttttaaaaacagcaagtcttagttttaatcagtcctttaggaacctgatagatggcctactaattcgattcttataatgttatcaactttgttttattgctttattaagcagtagtagttgttttttttttttttttttttttttttttttttttttttaacaagcacttgaactgaaataaagcttaggcatgtggtttaccaacttgctagctatactgacgatacctttggtctaaatctttaagctttattccagtcaggcttttttttttttttaagaatacctaagattagtgtgtgtgtgttttttttttttttttaaatactttttaagttctagggtgcatgtgcacaacgtgcaggtttgttacataggtatatatgtgccatgtggtttgctgcagccatcaactcgtcatttacattaggtatttctcctaatgctatccctcccccagtcccccactccccaacaggccctgatgtgtaatgttccctgccctgtgtccatgtgttctcattgttcagttcccacctatgagtgagaacatgtggtgtctggttttctgtccttgtgatagtttgcttagaatgatgatttccagcttcaaccatgtctctgcaaaggacatgaactcgtctttttttatggctgcatagtattccatggtgtatatgtaccacattttcttaatccagtctatcattgatggacatttggattggtcccaagtctttgctactgtgaatagtgctgcagtaaacatatgtgtgcatgtgtctttatagtagcatgatttataatcctttgggtatatacccagtaatgggatcactgggtcaagtggtatttccagctctagatccttgaggactcgccacactgtcctccacaatggttgaactaatttacactcccacacagtgtaaaagccttcctatttctccacatcatctccagcacctgttgtttcctgactttttaatgatccccactctaactggtgtgagatggtatctcattgtggttttgatttgcatttctctgatgaccagtgatgagcattttttcatatgtctgttgactgcataaatgtcttcttttgcgaagtgtctgttcatatcctttgcccactttttgatggggttgtttgtttttttcttgtaaatttgtttaagttctttgtagattctggatattagccttttgtcaggtgggtagattgcaaaaattttctcccattctgtaggttgcctgttcactctgatggtagtttcttttgccgtgtagaagctctttagtttaattagatcccatttgtcaattttggcttctgttgccattgcttttggtgttttagtcatgaagtctttgcccatgccagtgttctgaatggtattgcctaggttttcttctgaggtttttatggtgttaggtcttacacttaagtctttcatccatcttgagttaatttttatgtaaggtgtaaggaagggatccagtttcagctttctacatatggctatccagttttcccagcaccatttattaaatggggaatcctttccccattgcttgtttttgtcaggtttgtcaaaggtcagatggttggttataggtgtgtggtgttatttctgaggcctctgtgctgttccattggtctatatctctgttttggtaccagtaccatgctgttttggtaccagtaccatgctgttttggttactgtagccttgtagtatagtttgaaatcaggtagcatggtgcctccagctttgttctttttgcttaggattgtcttggcaatgcgggctttttttttggttccatatgaactttaaagtagttttttccaattctgagactttgctgaagttgcttatcagcttatggagattttgggctgagacgatggggttttctaaatatacaatcatgtcatctgcaaacagagacaatttgactttacctaattgaacaccctttatttctttctcttgcctgtttgccctggccagaacttccaacactatgttgaataggagttaatagctaagattagttttatgtgttacatgttattaacacttttgtaaaattgatttttgataaggtaaaaatggagttgtcagtttagagaaatagtactacttgaaaatttttccttatatttagtctggattttaagttagaatttctcattagtcctctgactttttaatctagggtcaggcaagatcagtttcagaagttgtacagtttctttagaaaatttggaacaaatcaagatattttctgattgaaattttaaagaattgcagtctttgttctctagtggtgaagtgaagtgataaggttgcaagatttatttgtgtttattccaaaaagtatttcaggcagggtaagtaggacttctttgtcacctttttaaaaaatgttgatattaaagtggatgaatgtatgttcttgataaacattcaataaaataaatagattcatctttaaaaaaattttggcaagaaactgctgtacagaaaacgaatggtaaaaagttattcttcaggaatgtttcctaaaactgtaattgctttaagttagctgctgaaatggtttcctaataacgctttgttattctgttttatttcaacaatacatatgtagtaatgttgttcctattttgatgagagacaaacccatcaaacagtttttaaaatcaacaattgcttttgatatatccgtttgattactaaaataaagctattggtactttcacccaagtttattatgtttttaaaataaaatttatgtctttttaaggaaatcatataggctgaaatgatctaaataaaaatcagatttttattgtatcaggtctatttcagggaatgtagttaaattcaggtatagggttaactaagtttttgtcttttaaatgattagtaaaatttgttatgtgataaaggaaatatgtatttggtattgtgtgcgttagtatttgttactttttaacctagtgattgagttacagctttcttttcaacacatgacatcactttcccatgatgtaagatagatgataaattttccaatgattcttgagttttggagtatgaagaaataaaggataaaagattcttttctgtgttttcctgtttcgttactacctggtcatgctcctaggccactgtccatcagtactgtagagttagcctgttgacagtcacatgtcatgtgttgagtgcgtagccaagggattttcgtagaatgccttttttgtctttacatttttctgagatattttatccaaaccaaggttttctttagcagggatggtgatcatttttattttatttatttttttgttggagaatggtgtaaaggtgggtaattttgagagagaggaaatagaatggtagtgagttgagggtaggaaaatacatctgcaacttttattgttttttaaatgagcatcttgatagggaagatagaatggaattgtcaaaaattgttaatgtgtttgacaaagtgtggctgtcagtatgatctttttgttacattttgacatgaacaattgtccttttattggggctgttaatgctattttagaatatcatgagcatctgaaggcaatagtttagcagtgtccataaagcatcaaataccattataatatctagtaaccctaacagcaatatttcagaatccctgcctgtttaaatgggctatctgtgaatgtacttgctcagggatgcatgacccacatcacctataaatttgattggaagctaacagtactggcgtagcctgatggatagcagattagagccctgattaaccatgtgattcaaagactgggaatatattgtctaagcaagattcatcagatgcaatcagaatttcaagtggtcagatgaaattcaaatgtgtgttgtggcttttcctcccctattgcttttcctcctaggttgcctttttttccttctttccccaaagctgaaaaatacttctttgatgaatctgctccttaccctaaagctgtctgtctgttattcatcagaaagcaggtcgcagttcagtgagcagaagaaaagattttaatagaagctgtgccaagggctgtaatgcatcattttagggccctaattacattacaatgacaaatatcaatggtgacaacagcaataacctacatcctttaatggctgtgctggaaaaggagtttgggccccacgccattatattagactcagtttcaaaacataggccattagaagtgtgtgtccacagtgttattggctgatcgctaaagcccagtggaaaggcctgtaaataaatgatgcctccctaaagctgggtcctgtgggacaaaagaggcgaaattagatgaccatgggagcagcagtgtttccgaggcaactttagatttcaaagtgaagaatgacctgcttaattttatgaaatcacacacacaccccacccccccactgccaattagcctgaccatgaaaatccattggcatgacaacttaaagaaattaagaagtcttttaaacaaaaggagatctttaacggaagtttggaaggtttctgccctcccgtttctgttgtgtgtgtgttaacctatgtgattgaataaaaaggctcttctcctttttacatttatttttaagaaaatgtagaatttttttaaaaaatagttgctcagacttaatacagcctaggtccaaaattttatttcaccagatgaataagtttccttagagtcgtttttattgcctagattatgtaggcgaactaaagaactcagttttcttatgtgcccacacatttttcagccctcctagcaagggactattttatttatgtaaacaacataatgacgaaaatatgcttggcagatggttctaagcattagaatcatcagtttggtctgccccaaagtgtctcattatcttttattctctccccctccacctctccctgcaaaaagcttaacaaccaaatgcatttgagatgctgtactttcagcctggtgaatgctactctatttttattgctcaccctggaatttcaccccataaccactgtggtatgttcgtccaggtggagagtggtttggtgattcccattgcagctcttcatggtggcttaagcattcttaaaggatggctaaatgctccatggggccagtgcagtaaattaaatcaggtcagcacagttgggtccttattcactgcagcttattggtgctgggtttttgtccatactgttaggaatgcaggctggaatggaaagcttggatttgaaacttcatggtgaatttgtgttttcttttggctggtaaagtttttaaggtgctggcatttaaaagattgcatagctacacagttagaagggttgctgatgaaagaaggaagcctagattgcacaagtagagtgtcactgtcattctggtaatgacttggcaagaaaaggcattttgggcctcacataaaatgaggaactgaccctggatggaatttaagaatgtcttagggatagtaattgctttacattttctgcctttcaattcttcttagctctctttcctccattccatcattaaaatataaactattttgtatgtacgtgtattaaaaaaaactgtgtatttatacatcacaaaatatacaaggcaccatctgaaaaatacaaattaagataaacattggtaaaactgtgagtaactttttaaagaaaacatgtagtggtggtttttcttttaacttactgtagcatcttattggtttaaaatgtctgtacttataaaaattattagagaatagactgttctttgacattgttgggacttttgcatatccacagtaaaaaaaaaaaaaaaaaaaaaaagttcccaaggatagtttccagatacatacagattgcttcctgctaagtgtaataagattttagcatatctcaacctctgcacactgaaaaccttggtaggacacatttggaaatttttatggttgaagaaaacattttgttctccaagaatttgtaagaatccgaattagccaacttttttgggttgtttgggtgctgctgtttcagaagtttagggtcttgagtttaaaatcacagcaccaatgtttttaaagcaaaggccacaaatatagaaatccaatgatttgctaattgatggagttgagatgtaggaaagaatgtatctttacttatctaaattcttaagacttagaagactgcaggttttatggaaaacattagtatgagcaagggtcctggtgaaggctgttgaaaactgatttccagtcatggaaattaaattccattttatattgccctgatgcttgaaggttaactttttaagatgaatgctggttaataaattgtgctgttaatgtggcactgttgtcactgcttccttttaatgggcttactgatgagatagttttcctcttccttaggaaatatgccagccaaattataaagtatgttttaatatcatcctgttaatatttggggaatctgtaaccagctgactgttctctttattgctttcctttcccttattttttgcaggcagagattgtcaagaggctgaatgctatctgtgcacaagtcattcctttcctgtcccaagaggtaaggtagttgattttaggcactggactagaagttgccattttagtggttttgcagaaaagggattgtagaactgactctctggccttgccagtctcttggtgtttgtattttattttcatttctaagaaacagtgttctcactccaacttgtataccttagtaactttctgtgggatataatttatatgtgtttacataatggaatattttctagttgggctaagcaaaattcagtcgttaaaatattttgctatctttgtcgtgttgctcagaattatgcttgtttgtcataatggtacctaatagggtagactgaaaaattgccaggaaaacaggagcttactctgtactattgtcattgggcattaagaattggcagaagacatatcaaatggaaagactttttgtagtaaacaaactaatgaagcttttggctagctacttttaaacatttacttcttgtttcctgattaagtctttatattattgtgcttttgggaaaagacctgcaagatgaactcattgaactcgtttctctgagtgccacttttctcaaaattaggctttggtgatggtaggcttagcacattgctaaggcctggcatgcggctcactagttctcttgctcacctacaggggaagtgcatgccatcagcaaacaggcacaggttggaataaagcgatgcatttctagtgcttgttggcttccttgtggtttttttttctctccctgcttacttttggtagttacaaagttgaagtgagaatactggaaaaagataattttttgcttctggattactgaatgccttcatttgctcaggtaagatccactctaagaaggaaggagctaatgaaatatctgcatgtcttgtagccgcaatactttgtgctgtgggctgagaaggcacagaggcacttttcttcctaccctttcagttgttctataagtgtgttgtgtcactgcttttcaggagagaggttcattcacctgcttgccagcgggcatgtgccaatgttatgtggccaatatttgagcctgcatgtgtattatagatatgcagattgctgtatatgatttttttctttggtctggactgggttagacttgagtaactatgggtacccttcataggtatatactggggagggggcactcatattcacaaatcttgttgacactctgaattcacatgctcttttgggtcttgataaacaaagggtatgttgtcttttctcctcctttagctgtgaccacaaaacctaccaccagtcatgtccccatttgcctgtttttacttaggatttgcttatggctagattagatggcttggtgaatgagagtcaaggggtgtatctgcatttcttttggaaacctgactgccccctgcctgatccagactagtgtgtattttttactttaagcagctctgctttatggagatggagaatgggaagaatgtgtgacctacagagctgtaaccaggctggggtgtcatgttctaaggtgacagggaaaagttcgaattatccctggggtggtattagactttgggcctctgtaggcacagacccctgtatatgatcgctggtatggctttggtctcatcacatttctgcaggatctgtgggttgtgttcagaagtagaaggttgtcttggggatgttgatgaagctgatttgccaatgagttgttttcccacatgaattatgttgtttgtgtgagcaggcccagtgggaacagaatgtataatggtagtggtgctgagcaagactggactgaaattaattgtctaaggaagttgtacctgtaggtgaaagccatggggagatactgacaactcatttgctctagtctgggaagaaaggtgtcatacttaactgttgtcataccacttaactatttatttcccaaatactttgacatttcttggttgaaatccttgactcacgtataatgatttatgccaagcttgtgcaaccccagggcctgtgggccacatgtggcccaggatagctttgaaagtggcccaacacaaattttaaactttcttaaaacagtatgagatttttctttgcaattttttttaagctcatcagttatcgttagtgtattttatgtgtagcccacataaaatgggatgtgtgtgtgatttcttcttccagtgtggcccagggaagccaaaagattggacacccgtgatctatgccatggttttctaaatgctagttctgtgtatatattttcttttgcttactttagatttaatttactcatctttttctagtttcctaaggtatgtgtgtatcttttattgtgtgagacacaaacatgtttgtttccttcaaatcagggcatctctgatgttttttatctgaacatcgtccaccttgtttcttcttctgtgcattctgtgagcattggactccttgcttctgccctgaagccagatggaccataatctggagggaggggaggagcaggttagtagaggaagatgaattctgtttcctgtctcttcagaggcatggaaaatcactcttgcatggctgtgagcatcactgtgccaggactgaaggctcttaatctgatcttttaacaccggctctctgtgtgacagtctcgctaccaaaacggcagctgctgcattagaatttattttaaaatgtttttatttaaaaattaaatgatcgtatttaggaaaaagcaaaacaattcctgaagagtagtgcataagctaacagaacattggctggagcgattgtgagcatctgaagtcaggctttttggagtttgacaggaacaaggggtatatttacatactgttagatgaagtctctttttaatttagcccccatgtgttgattaatatacctgcttaatattgcttgcgtctggtttaccgcatttttttaaacttaaaaaaactatatagtactgaatgataactattaaatttagctttaacttcaagactttttctttttagaaatgagttgtataattgtgttcagaagtacttgaagtgtgtctgtatatgaaaatcacagaaaaatattttcctattagagtttactaaaacatttaaaaatattaaagccaatatatactttaataatgtgctgttgcactcacgtacaactgcttccagcgttacaggcatttgacaaagatattgccaactcttgtcattaaaagtgagtactcatcacttggagttcatagaatttcacaggattctcaatatcagaatttagaaaaaccttgtgaaccctcatctgtcccaagctgttcttttctctcacttcactttttagcttttaggaatggataagactcaaatttattcttcaaaaagccatctcaaggtggtaaacgggaagctcttttctttccctatttcggtctcatttgcaggggaagaactataaatatcaactctgagttggcagttccataaacaagagatgccaggatgatgacagttggatctgggtcctggcctccctattacaaatcgtgtggtttactctaactgggctaagctgggtgacctttagcaagtgatgtgcctctctaagcctcagtttcctcatctgtatgatgaagttaatcatagcgtgaaacacatccaatgtctgtgaagattacttgggattatacccaggtagcttagcacacaataagcacctactgccgttgactagtgggattaactacagtagcagcagtggagctctgtctcctcttgggaggagctagaaccagccctccctcccttttctaatcattgcatttgggaagaatgtgaattgattatcttcctctctaatgtccttatagaagaaaaaatgaaaattaaaagtgaacccagggccttgaactagctaaaaatctatgtttttgtttccattggcaattttgggatatggcttatagacccttagacctcagtgggtccttagtaaaactgaggattgccaataaatattgtattgcttccagtatcccagtaacaactcctcctccatcccccaattccaggaacatatctatgtagagagtctaaggtggacctaaaactctacatcactgttacaccctggcagtaagggacagcatttctgctaatttagaattgggctagctctccctcttcactagctttgcattgcaaagttgatctctctaagccttagtattcctgtagaataaggagagtaagcccacctttacaatgtgtattatatgtatcaaaatgtaacagacttggcatagggagtgccgtttccccacctgctcttttcctattttacttccagggaaatagattctatttcaggttatttggggtcctaagacatttggaaaggaatgacttagtaaaaactgggaagagttcaaggtaatatttcaaacgagctggctggcagtcttcctgcagagttagctaggccttgcagctccagtagctgcttccaacgatggacatttagctccacacaggttatctttcaggaggaagggaatttttttttttttaagtaaaccagtaggtatttttcttaacctgttagattaagcaggaaatattgtgcacttagttgaggacctgttggaggatagttgtgttttttgtactcttgtttccctataaggatcacttttaagatagggtatgtttcacagtgatccacaaggtgttcctaagatctttgagaacctcaaactcttgaaaagcagtaggtcagtaggtgaaaagtttattacgttatagttgaaaattattctccagggtacagttgtatttttcagaaacttgtcgcttcagtaacaaggagcacattcattggaagaggcacattaggcaagaggcaatgtaataaaagctggaggtcagccagacccaggactaaatcttggctcagccacttgctttctttaaaatgtggagcaaaatacttaacttttctgggctgcagtttgcttatcggtataatgggatacctgtactgtaggatttttatatgaggattcgtgacagtgtaaaaggacctcactgaatgtttggctgctttaacagagatcaaaggaacagtggttttttcaaggaaaaaaaaaaaaaagcttgtttctctctcatgtaatagtaacagttgacagcgaagccatctatagctaatttggtgactccatgatgttgtgaattcggttccttttatatcgacgttcatcatccttgcaccattgtgtcttgccccagcgtcagctggcaggaaagagaaaggaatgggcaagttatttccttttaaggttgccctctttgcagtggccagcacttagttacctgcccacagatagttgtaagggagatacagaaatgtagtcttagctgagtgaccattatgcccccctaaaacttacaccagtgtaagagaagggatactgggggacaactgccacttgcttccagacataatgctatgcacaaaataaaaattatggctattgttactgctaatggtttatctttacataacaaactctagctttgactatgtaattagcacatctcatgtttttcagttacataagatataaaataatgcatagttcttgttatagaagtctcttccttaccattcgaatgttggagaagagtcacccatcaggtattatttatcattcatacattcataggggatggaaaagaacctacatgaacagtatggcctctgtgggctgtctatatttgtgtttcttatgaccagtggcttcctaattctcatttattaaactcatggtcattgttacctttagagaaatggcattcatttttaaccttgttattagcagacttgtttctagtcactgggtgccaaggaggatggacattttcctccttctacactcctgtaattccatgactgttttttttggtggtggtggttgttttttgagtcgaaacagaagccgagctgctcagaggctgatggaggagccctgcaggctagtcctcacagcaatgatgaggagcacacctgggggcctgcacttgcacatgaacggagctgtttttcccttgcatcagttattttaagaaaatattggtttaacaaatgaaataaagaagacgttattctttttacaatatttaacaatagttctctgatcattagaatattgagaatataaaagggaaattaggacctaaaaatggaaaccttccatttttatacttattttacctggggaaaagggaacttccataccaacctgaatgctttctggtgcaaatttaattttaacttaaaacttggtttgtattgccctgttagcttttctaacacgtagtaccaagtagtgtttgggcactctccattgcatttatttggtagaaaataatagtcaattacataatagtgataatatgagtttatttgaattataaatccaacaggctagaaaagctagtcacatcaaacgatacataaactcctgttttggacatgccataaatttggtccatgtaatttgatggaaaacaaaccccttctactacattgtgatatatgagtatatctcagatgctgtttacttgggcatctcggttaatatggtactgaattacttggagccacattttgcatgtatagaataattgtgaaatgaaagttgaaaaatgtgatcagtcactttcatattgtgccttcgggaggaaatgaagaaaatacagtggttatatgcactggtggaagtgttatcgccttacagtcgtgccaggttaacttgtcttattgcttgttaactttgcgaggaatcaatggcttgtgataacaggtttgatataggagagcatggttaaaattgcagagatcccctggcaagtatgcagtgacatccctaagaccatcttcagaaagtgcttgtgttaagtgccagcagcctgcacagggcacgtctgcttcccagttggagccattttgtcagtcttggtaatatgttatgacagtgccatatatcggaagaatgtcctaaaatgaataatagacatggattggggcttctggggatttggcccagttttctgattttcacattaggttgtgggcatgggtaacttttcatttaaaaaatatatattttctcataatactgaatgagccatcagagagcgtaattctgtcccatattccgtggttgactgattggcttgctgtacctgaccatgtattttggtgacagttggctgcttggtgagattcatctggtggcatcatggcctgtttgacctcaagaagtgaaagatgattctcaggaggtagaacttttttcctgtggtttaaatgtgggtctctatccaaaggcagcaatgccaacctttatctgtatgtctcaacaaattaatgagtgtttgagaactgactcatttatttgacttttagttaggtagtgattagattattattagtggagctaagtttgaaggtaccttgagtagagctgcattgtccaatacagtagtagctatgtaaagttgaataaaattaaaagttcagtttcttagttactctagctacatttcaagtgctcagtatccactcatatgtggctagtggctgtcatattattagcacagatacagaacatttccaacattgcccaaagttctgttggacagcagtgaatttgtagagcttacctatccgtgaagaatgccctgtccccatgtaagtgagagtggagaaggcaaggccaggtaggcagtcagtaatgtgctcctaagagctttaatcccatgttccacagctaaaattgtttgggaagccaggtatacttatttactctctctaagctttgtggtgctgagataacctgcagtttaccgggtatttgccaaattaaacctgtgtttgtgtacgtgtatgtatgtgtctaagtaatatctaaagtaatatctaatttcttgggtgactgtgttgggctgttcttgcattgctataaagaaatacctgagactgggtaatttataaagaaaaggctttattggctcatggttctgtaggctgcacaagcatggcaccaacattacttggcttctggggaggactcagggagctttttttactcatgatggaaggcgaagtggtgaaagcagaaaaggagagagagattgagggggaggtgtcatacactttttaagggccagatattgtgagaactcactctctgttgcgaagacaacatcaggccatgaaggattcacccccatgacccagacacctcccaccaggccccacctccagcattgggaattacaattcaatgtgagattggagttgggacaaatatgcaaactgtatcagattaatgtttctttgaatactgtataggaaaggctgatttggggagattgggttaaatttaagttgatttgtactagcaaatttaatagagttgctgaaaaaggcttttagtgggattttttatcctgacttagcagacatggagcgacactttcacttgaatttgatctgcttggccatacctggagtaatgtgcactacaaggagactagccagaaggatggatgagtgggctagagcccatgacacagagaaattgttgagtgaccttaggatggttaacctagaagagataaaattgagaacatgcattatgcattgtcatatacttggagtgtcagtcaatggaggagaatttaaagacaaaactgggtccagtggggaagaattaatggcagggtagatttcaacttagtattagggctcattatcccaaaatggaaaaagcttgtccatgaggtagtgaattgcctttcacaggaggtgatcaaggagagactggttagggtgtgacagaggagattgattcattggatagagtagtggcctttgggctgtggttggtactgtagttccgccatcccaatctgctcagccccggcagtgtttagaaatttgcgtgcttttggtgatagggagagtcttttgttgattggttggttggttgattgttaatagtgcctggggtactctggcatctgggtctcatggtctctaaaggccttttccagttctgaatttctatgagtggcttcttaagtacatgtggctaatggcttctattagccaaaagggcatttggtccaagttcgggcctaagtatctttcaccctagaatattgcagccctctaactgtttacccttcaatctggtttacctctctgccatccaccttctttacttttcccagatccatcttactcaaatgcagaactgatagcacatagctgcttaaaattttttaataacatctcatttcctaccaggataaagtccaacttttttgcatgtcatgcaaagccctttgctgtttggcctcctcctgtcttgccagaattcatttcccactaatacttggttctttaaagcatttccatgctacactcatgtcttcatccattttcctttatttttctttgtgtgcacaccctttccactttaaagtgttcttgcttatgtgtcttatcatacccaagaaggccctatgaaattctactctgcttgtctgcagctgtgtcccctacctgctctccctcttccagccacacagacattcttgctcttcctataaggcccctacccagttctcttccctttgcctggaattcttttatcctcattcttcatctacagaattcctggaaatccttcaggtctcagttgtcaggtcagcttcctaagggaatcttcccctagccccaatattagattaagatatttccctgataaatgattgggtagcatcctgtaatttttcttatggaaattatcctccagttgtaattatagagccttttgagcattaattcactgactgttttccttgatagagtttaaattctatgagatcaaagactatggttcttgttccttactctaaccttagtatctccctaccacagtgcctggtgccatagtaggtgcttaataaatatttgaatgaatggatgaaaaaaacaaagccttcccagatgccgcgggaagtgcgctggccatttcctcctaaaacttctttctgttttatatcctgtattcctctaagatgtgctctgtgtatgagttcatcacgtgagaagcagggccattggtcttactttcacctctccacatgttggagactttaattaatattgttcattatgagaatcctagtttattttgtttcattttatatctatctctacccttatactcttttactaccccagtcaatatggggagtactttttaaatgtttttttaaaattttaatttataaaattttgaagcatactttagagagagaatatactgaacctacaggtacccatactaaacatcggcagtaatcagcattttgtctttttgtctcatttattccttaggggagttcttttgtttttgttttattattatttttttttaattctgaggtgtactatagctttttattacggttttttattagaagtactgcatctgttgctgtgccctaaaacattggcatgacaggtattctcatcataataccttctgagaaatatatattaaacacctactatacacatattactggtttgttaaggtctgctttttagcaggcttttttggacttatgagctggtattattttagtttcttatagaaaaaatatattagtactttgtctgaacaaatgccagaaataattttatgatgatggaagtaaggcaagtgatttaatgtacagaatttcattttactggccctttcccctgcaaccatgtttgtattgcttaaatcacttttttaaaaaaattatttttactgaggtataatttacacaccataaaattccctagttttaagtgtatggttcaatacttttcagtaactttacagagtcgtataaccatcaccacaatctaagggttttttttttttttttttagaatttttttaaaattgtaaagtacagcattttaaagaataaataattgggcatttgttttgtctcttcaaaatcccagttagaggtcccctctcttacccttggcttactaatatattcttagtggcatttcatttggtggtactggtggcgcattcaaacaggacacttgtatctgagtgagcagctggagcagtaagaatgacaacacttggtctctgcagattggctggacccaccactctggtgctagtgctggcttggtggctgagggaacaagcaggaagtagaagaggaaatgagatgtgggtggagtgggaagagaggacagattggggaggggagggaaagtggaagacaaggcagacataatgggaaagccctcatagttctaagaagatgtgaaaaacttgctgtttttttctgagtgagagcttacttgttaaaacccgaaaatggaaaaaaaaaaaaaaaaagcctcctgggtcagtttatgggagtactttgggcttccttgcatgttcatttttctcttttgtgtgtaatcttttgacccttcttcctgtttgggttttaattttctcaccttccctggtgggtgcttcctcaggctgtggcgtaatgttacatggtgtggctgagtgagctaatatattagggtgtttctggtgctttcagagcacacaggggaggaggcattgtttgccttagggagcttctattcaaaaggtccttaaacagtgaatgattcatgggttgtaagcagaaatagggaagtagaattctgaactgcaggtaaagttcagatatcagcccacagccattgccatcaaaaagaagaagctgaatcatgacttccattgtcattttagctttatagcaggagtttctttaggctgtcagagttatggctcactggtgtgcgtttccggttttctgaaaaaatgcacttgattttaatgccagtgcggaaagatatcccctgctgcctaaggcatctttgcccattttagcaattggaatctagttcatgaagtaagtgttgaacagtcttcatgctagaatggcactaagtagatgtattttccatatctccgtctcatggaaactattctttgaatacttgcagataatatttcaacaatagggagaattggtagagtaagagctttaaaacttttgttgaatgaatgaatgcgtgagtagaatgaatgatacctgtgttggatgtgacttaagtgtggtcctttgtttcagttccgaagttttaagtttcttttaaatctatttcttttctttttttttttttttttttttttgagacggagtctcgctctgtcgcccaggctggagtgcagtggcgggatctcggctcactgcaagctccgcctcccgggttcacgccattctcctgcctcagcctcccaagtagctgggactacaggcgcccgccactacgcccggctaattttttgtatttttagtagagacggggtttcgccgttttagccgggatggtctcgatctcctgacctcgtgatccgcccgcctcggcctcccaaagtgctgggattacaggcgtgagccaccgcgcccggccttaaatctatttcttttaagatttaaaagaaatacctgaagttcttaaacttgagttctatgtttttgatcgcttttaaatatgcagcccttcatgataggagttaaaacacgaacaatttgcacatttccagaagaaacatgtttgttgtattctgtatgtccttccggtgtctacactaactgatatcattgttgagtataggaaagtaaaaggtggaaaatcccataaacatttctatcctacttttttttttgttttccaagtactgccatttctcaccatctagagaatcaaattgtcttcaatgtgaacatgagctctgtgtttggcacatagtaagtgctcaacatacatacatggtcaggttggctttaggggaacctgaaatgacaattgctggccattttattgactgtgcccttctattccttctaatattttcaaaatcccttaagacttttacttgcttcagagaaagaaatttttttcttccatgttagcaaatattataaggaataaaagaatggaatggacatatctataaatagacttttatatttatataaaataaataaatatatatttatatatattttgggattgcttcttaagctcctgctttgaaaatggaatgcatacaatttaaaaacattaaaaagtatatagtttaataatcagagtctattaaaagcttaagattctatggtctattatttgacatttttcttcccattagtcatagacacaaaatacacatttctattaggaaaccaagagtgaaaacatcacattgtaaataattaaagtcgtttccttttccacctggcctccccactccccttacacagctcagaggtggaaataatggtcaccctagttaatctcagtaactatatttgaggattttggaatgggggccaggtggttcacggagaattccacattgaactgatagctctttgtattattaagcagtgtggtagttgagcttcatactcatctcaaataagtgaagaaagttagctaaatttctcaactgagattaaccaaaataagactcttcagatgtacagaggagtacttgtttcacggcgcagttcctttggttcttcattcactaaaccaagttgaaagaaacccagtaagactgattttaaaccaaaattgactgtagatactagagtggtcaaatgttttaatgggaaataatatttagataatatttggagggggtaattcttgtaagcacttctgtgtctagatatatatgagtgcccctatacagagacttccatgctactttttctgtacaaaaattactaacatcagttcttacttattctcactggaactgagttgtggatggagggattttcctgtactgtccgtcctagtttttctaagaaaaaaaattatcgtacacttttgtgggctttagtttttctgttggatttaaaagaaatacctgaagttcttaaacttgagttctatgtttttgatctctttttaatccctatctcatgataggggttaaaacaccaacaatttgcacatttccagaagaaatatgtatgttgcattatgtatgtccttccggtgtcttcgctaaccgttatcgggagaaaatttaaaaataattacttccaggaaacaatttttaaaaattttaatgtagatagcaaagagaaaaggtagtgagtacaaagaaagcaagtgggatgggttctgttttgtttgttagtactaatagcagatgggtggtccaagtgtaccataacttttaagtgaaatttaagctgttgtaaaggagcattcttcatggggtcacagagatggtacctgcagttggatgcccagtgactcctcaactttgtggacccagatgtaccctagacatctagtcatccatcacctcaggcttgtattggaaacctggagatcccccaaatgctgttttgcatgtaactgaagttagaggacatgttaggaaaagctgttcttgactgagtagaaaacaaataattgtattctgtttctgatcttcatttatagcaccagcaacaagtggtgcaggctgtggaacgggccaagcaggtgaccatggcagaactgaacgccatcattggggtacgtggcctttccattttagctctgatcttagtgtttgtcatcagctctctcgctctctctttttacattttgttccgccaaaggggcaaaaagcaatagatgactacaaaatgaaattaagcactttgccttcaatctcctgtgaaatttgatggctgccttagaaactttggatcacattctcaccaatttaagtggatgtgttcatgaaaactctcctctaaggagactggatagctctttttcatatttctttgctttgcaatcagcttgtgttgctaacctaggccaaaaaaaaaaagagatatagattgccctgacgttaaaatgacctggtttcttttttctttccttgaataatcatgtagagtatcttactatcatttttaatgaggtgtacattttcacatctcccgttctacttattcttccttcccctgtcatgagtggctcttatgggttagtgtccatttgaaatagaaataatagatgaactacactttatttttaaaaaaatcagtggcccatttagaaaatccttcctggcaatagtggcattaatgttgcatagaaattgtgctggaattcatggatttgggcagtcacttcaactctgcttatatatgtatgttttttttttctcagattaatgtaacaggcaataaaataatgtgctgaaacttagaaataacaataaaggcaagaaatcacagctgtaaagagcataatattcacctctctatttatgcagattgtacaagcagttccttgggttattctaatgaagacactacaactgcactttcctctttctgtcccctcccaaatactttcttttgtgtatagattatacacaaaagtcttttttttttctgtcagtgtatcaaacacactttgaaatgctaattatttcgtttactttcattaaaattcaaattgctgagtgaagatgtggataagggtcgcctgataatcaatctgaagtgaagatattgcttcaattattcctctgtcttttaacaaggaaatcagaactctgggatcactgctgatgttgagggcgccatagtctgattgtagcttgttttttaatggggtatttggagctctattttatgtccctctgaccaaaaaaaaaaccaaaaaaacaaaaaaaacctggtaggaaattagcagatgtaatgaatggaaaagagtgacctttatttcctccagagtgccccttggaaacaagaggctgaatcagaagaagccatgtagaatcatgaataatgtttgtcatacattttgtgtgatgggcaggggaagggacggatagtagagacgaatacatttcgcaattggttttcgtttccaaaaactccaggaaacagcagtatattaaatttttaaaagttgagaaaggtttaattttaaagttaagtgtgtgtgtgtgtgtgtgtgtgtgtgtgtgtgtgtatatgtataaaccagctgtgctccattgacgtgtgtgcacaagtgcaggtgttgtattcactgtggatatttttgttaccaaatcttccaggggtcagaagggatagaacctacatttctctactgtctctactgtttaccatggagagaatgtgcagagtgatccctgataggagaggttgctgggtcatttttagcttagcgtttactgtttgtatgaatggctgaaatacagatagccctcctgccttatgtgtgattggcagccttttctaggaaaacagaatggattattattatttttttttcctttttttgagtcttttaatgactgtacagtggagagattaagctaaataaaaaacactttgtttatgtgttggatgttgcttaatatgagggaagatataaaatcagaacaagttcccttcacttcacatcaagaatatttttaatattgttttatatttattcatttttatatactttatttggaatggaatggccgattgccttttcttggggaaatgaggatttattagactgcagccaagttactgacatattgtgtttatatgtatttaattattaaaataaagctaacttaattttgtgacctaaaaacttaaagaactaactcagcagtacattctgtcaaagcagcgttacgtgctatcaacgcggcatatacttggatatagttggatatagttggatctgatgagtcttccaaactcttggtatctgagcagaaaatggagtcggaaatcacattatctgactattctggaaaatagattgcagaaataggaaaacaaacccaacagttttagagaaccacaaaccaagtgagaaggaaagagctcagttacaaactcacttgacaaatttttgctgctgaggttctctttgtctttttagccatggtagtgcttgcatccagtagtttttgcagttgtaacattgtagtattttaaaggcacttgctgttctctgtcccttgagcgtagatggctggctgagttggtggtattttgacacgctaccaaaaacaactaggggtcagtttttagatttttgttacttggtttttagaatgtagtcagcagtgattttctgcactgaaggaatgacagttttcctttgagaggcaaagacccatctaagcccctgcagaccctcatttatttatcactacatatgtgtctattttatatgtatgcacaccatccagacaagagcaaatgttcccagatttaatgaaatctgatgaagcacctttttaactctgcaatattattctaccttcattggtaaatgagccaaacgagtgatccatgcagtttaaatgcaaaatgctgaagtgatcccgtaatctggagaggcggctgttctcttgacaataagctggttgtgtttaatggaatgaaacacagttataatgatttctttcacaggtcatgttcagtttaaaactgttgatagattgaaataagttaaatatcatttatcttttatttataaggaagaaaaccaggaaaattcctgtgttggtttcccatcgttgatattttgtgttttgttttgaattggtgatattacacatttccttcaggccttccccaagttccctcagttgggctaggggaacgttatggatctagtttgattttgtcatgtgtcctgctagccactgtgtttttaaattagaatctctgcgagatcacactgttggaacaacacacaaattgtagttttaaatcagtaatatgatctaattagaaatgatgttttcatttcctgtattattaaattgagtcacctgactatcttaaaatgctttttaaatctattacactatataatcagtacatgctgtgtgaatgtggttatgcttaataaaggaggctgacttggaacctcataagaatttcaccaaagaaactaccattaagaaaaaaagtttagtcagtgtgaatagtggaaaagaaaatgtttggcttataaaaatagacgatgtgggttcctttggaaaccccctaacccactttttaaacctaattctgaggaaaaaaaaatgatagaaatgtatgcgtttggaaaaaagctcacccccatccccaataaacccttaggaaacaggtatgccatggtgttgtaggaattgcagtttagcacaagaaatgctgaacctcaatttttagcagtgacattttaatgataggaagtctgcaaaattatttgccatcaattgtgaaggcaataacaagccttggtggtttttcacactctctgtgttaagtgctttcagaatgacagcgtaaactgtgttagagaactccaaggaagtaaaactgattaaaatgttcatgcttgaatggtgctgatggaatagttcatttggactttctctacctcctgcagctcaagctgaaatattaaaattcagtggatttaaatctctttcctctcagctcaggaaaaaaacattacattttaataggttttaaacccataattcattggattggagcagcactattaaatctatttaaatattacttgtattactaaggaaatgatttaaatgactttgcctttaccatcctatgtgtttgagttagtttaaaaaaagaaagacaatacctttgcggtcccccccttagtattttgttttcttgtccttgtcatatgattgaaccttaaatgtgtgtgtgtgtgtgtgtgtgtgtgtgtgtgtgtgtgtgtgtgtgttttctacattgacaacgtggtaagagggtcttgcagtatgactgtttaaaaatgtatgtctcttcttttccgttatagatttcaaaactgccattttaactttcaaaggcatttggatgagccaccgtggtcattttccttgtattctttttaaacagtttagccattaggcagaaagggaaagatataaatatgtgggtatatataaaaatgtgtgtgtgtgtgtttccctcccttacattgcaagtgtaggaaatatacccctgtggatacatggcctccagtaacacacaacttgaaattaaatttaaaaatttacgtttttttacaaaagtattcttcctgggcccaccgtgtacccctcagttcctttctctctagcccttgccactacaacatgtgtcccacagcctgacagcacctccagtcagccatagcgcgaagtgcttgctttcccccagtgctttgtgggaaacctttgtggggaatccacccttcacttacacaagcacagcctggaaagtgcaggaattacagctgcattgggtaaccctgaatcccacagggaaacagagttagtggaatgctccccgcattctctgggggagacacctgtaagatgccttctatgctactccacaaaaggttccagtaggatggagcttcagttgcccacagtagtgataggctagataatacatgtttattttgagttttcccccttccgtggttcactattcataggcccgtactcctgttctgtgatcatttcaaaattacctgcagccaagccctctccctccactttcccggcagacacttaggatttgatttcataggcctcaagctacttaagggggctttacagtgtaggtaggtaattgtagtcatgtactagagtcagggcttgttttctgatgtgagttctgtgcgtaaaacatatttaacagctcaactgtacaactcagcttttgtgttattttttaaataaatatttttcagtaaacttacaggtgagcttctctatcttgttctgcttcttgcagctgattactattggtattttctagatgtatgtaatacagaatgaaattaaaaatgagctataaaatagatttatcagagattgttatttcagctttgttactgtctttactgaatagtgtgcctggagcttaaaggctttataaaacatgctggccactgtctgtgtcgtgtacacacacagcttgcacaatgggggaaggggctggcttgaagatgcactcacttggagggctttactcacctgcattcatcaaacacatggcaggaacaccaaagcagttttacatcacattctttcttctttatcttctgtgggtgtgcctgcccctcactctttttcttttcttaactggttcatttgccatggagcaggggactacattattgaatgatgtattcataatctaatctttctgctacggtttgatgaggctctaagaggcagtaatttcccttctctcataacaaagactctcatatatttaagtaatttaaaaactctgcctgcacttcagagacgcccaaaaaccactaggtaaggaataggatttctgatttgtgcttgtgatgtgctctccgttattttctatgacaaagcttctctggaagaaatttctagaagccagtctatcaatcctctcacctccaaaactgggactagccagcaatgctacaatttttctttctgtttggagctgagccatcctttcctttcccccagtgaatgcacttccatcgctgtagagttgagttcaaagtgttataagagttgcagaatgtgtctgggtagatgtatctgaggaagggatatgggcattggcttccactgagaagaaagtagttctcccagatccacagagctcggcaggctgagcttatgcagaggtctgaggaatggttatatagaaaaacaggctaaaacagagaataaggcaacctgcaagcttgcagttccagagtgttaccccattttataggttgttttgttttggttttgtgtcacttttgtaattctctgatgatttcctgccagcagtgtttccacaagcagcatcaccaacttccgtatagtcagagacctttttccttgtggtgtcagactgctttgtacccctcgaagctgagagggagggaagaagcatgggctataagagacagtctcacaccaaacaggcaactaaagggttattgacagtggttaactgtcaagcacttaggtgaggtttttaaggacttttgttgcctgttctcaaagctccctaagaaaccagtttgggaatccttctaccccaaaatgcatgtgtggtcttaagtgttgtccttaagacctttgtgaaaaggttagaactctttagtgaatagcaagagttatttaatgattatgtccattcattcattcagtaaatatttgagtactttcaccaatatcctattaaaggggcatattttattttcattttgagtgatattttaaattgtcttctgaaatatattctgaaatgatcctcaagttacatttaaatcattctattaaaattttggtagctgtcagcttgctggtattacattgtacttacaaataatcaacttttaattaacgcattttaatttcaataaagctagtttccatggataacagagtaaagagaaatagttaataaaaaacataagaatgaagcagcatacatttacggatttgtatttttttatatttgcagatacattttcagatatttggattaggaatttagaaattcattattgatattctctattacatcagatttaatgagacgtaatctgcaaaaagtaaaatttaccctttccagtgtgtaggtctttgagttttgacaaccgaatacagttgtgtaactgccaccacaatcaagatacaggatagttccctccaccccaatcccttgttactctttgtagtcagtcatttttttctatcccagcccccgccaaccattgaaaatgtgtcttcttccaaagtgagcctttttgacaatgtcatgtaaatggaattatatatcatgtagccttccgaggtttcttcttttacttagcataaggcatttgtgatttgtccatgtggttgctcatatcagtagttagtgcctgtgtattgcagactgatattctattgtatggatataccagtttatctgttcactccttaaaggacagttggttgaataaagccacgagaaacattcttatttggatattttaagtaagtgaatgtaagttatatcttttgggtgattacctagaagtgggattgctgagttacatggtaaatgcacgttaaactttccaagtaattgacatactgtttctcagagtgattctactattttgcagtttcactaatatattacatgtaagaaaacctttcctctacatctttgtctgcacttggaattacaggttttggggaggttattttagccatcctaataggtgcataatagtacttactgtgttttttatgcattttcataacaattaatgatgttaagtgtcttttttgctgtctctgtatcttttctgatatctgttcaaatctttgcctctttttttttcatcagtcagttttattattgagttttaagagttctttaattttctggatttttttgtgtattttgtaattctcccaatctatagtttaacattgtcaaagttaaacttaggctttttttttcctttatggacttttggtgttgtctgtaagtaatctttgcctaaccgaagaccgcaaacatgttattctggggtttcttgtagaagttttacatttaggtctataattcagttcaatttttgtttatggtaagatatatgcattaagttgaggtttttttttttttttcccacaaggacatggattcagtttttctagcactatttgttgaaaaggctatcctttctccattgatttgtctttgcaccattgttgaaaatcaattaaccttatatgtatgagtgtatttctgactgctccaatcaactgttgccgtctcttttgctagtgctatactgtgttgatgactatagctttcattattgatgttctccattccgttttgcacttgttcttcctgttcttccttgccctttgcagtactcctcagcacttcaggtctttatcatcagtatactaaagactgactgatggatgaagggaaagggtctaagctcagtataaacactttctctcatcagaaatggtgtctgctccacctcctaacatttctctcaaggttgagcgcatttttccatctcctcctggtccaagtaatgcctttagctagactcttccagcctcttcctgataggctaccatgtttccgcatttgtctttctttcattctacacacagcagccagagtgaccttcttataaaatagaaataggatctattggtcctctgcttaaagccacagtgagtgtggtggtgtcgtctatatatatgagactatatatagtagctgagacgctactcgggaggctactggatcacttgagcgcaagagttcaagaccagcctgggcaacagcaggatttcatttctaaaaaatttaaaaaacaagcaaatgaaaaacccaggaaaacctgatggctgccccttttatttagaaaaaggtctgaatttctaaccttggcctacaagattcttcatgagctgacccctctttcactggcctttctgctgtcacataccacttatgttcttcattcagctgtccttaagccactttggcccctttcttctgtccctgggtcactccaagtgtgttctcgactgagggtttgtgcaccagcttctctgtcctctggatagcccatcctctggatcctagagtggtcttccttatgcctcttttcagagtgtcagctcagatgttatttcctgaggaaggactttcttggctggcactctttttactctttgcttctaattcattctctgtcccattaacctgttttattgtcgtcattgcacttaccattgatttgttatgcatcactttcccttgactagctagtgaaatctcattcacttttgtagccatgaagcctagagcgataggtatctcataattttcaatacgtatttgtatgataaatattcagtaactatttgttcaataaatttgcagtaatttgttcataataattttccatagatgtttgttaaatactatgctctgggatattttctcatttggatattctccgtacaattttgagccaagatagaaaaggaagcgcatggactggtagaaaatatacagttctgggtttcacttatagtatgatattaggaatttcatttaggttttttcatctgtagaatgcaaggctggagctggcctatttattttgacgttaatggaatttttattttaaaacttggggtccttttgtgtcatagttatttttctaggtttatcacctccctaggcttgtattcttttcctgaaaaaggtaactaaatatagtagatgttattgaatattcgctctgtgttaagcatttacatgcattactttgtttaatcttcacatcaacctcatgtggaaggaaatactgttccagctttacaaataatgaaaccaagggctttgaagaggtaagtcattttctgaaggccacacaaaagaggagtggcaggactgggatccaaactccagctgacttcagaactcacacatttaaccattatgctacacttgtctcttatttgttctcttgactctgttctttctttcacactgtcatcaataatctctttatcttgagatccactgataggattgtccagccagagctcagtgttggaaggaaaatggaaactgggtatgctgggtccacatactaagtggttagtctaaattgtctgaattatattagttccacaggtcagttggatactcttgactcatacgttgttgcttcctgtctgttgtatcttactcttatgaacaagaactgaaagttgttataaacacagctgttaaggcaggtgttttaacccagtgtccttggatcttctggaatttcatgcttgggcattgggctgtcaattaaatgcctgaattgcttgcagaattgcctgtgtgtgtgtgtgtgtgtttggggttggtaggagaggagtatgtatagtttttggaggagagtgttcacaaagggtcctgtgacacaaacaagtttgaatccatgccttagtagaataggattgtgcaaaatcctgatatgaaatagcaaaatatcatgtggggtgcatgtagacaaaaaatatttgcccgtagcagcgtggggacacattctaggatggttgttcagaaacttggaaatcaggagtttacttttgtaggagggtttcttgattaagaactattgttggtactctagttgcaggcagcagtaggtgaggcaggggacatgactggtggtgaagaccataaaggggcccccaccaggccagtggctagtcaggagatataaacaagttagaacttacagggattgccattatgttgtggggagttctatctttgaaattacttcattgctttgtgataagctctatacttctctgcttctatttctctatcttgagaaaaccttgtatgcctgacttgtgaataacaattatttcatgagatagagtaatattgcaaacttaaaaaaatggttttgactaaatagttagagctaactgtgcctttgaccccaacctcttaagaaaaactcagaatggtacattcttgaatcctttttaaggcagctctatagctagtctgacccttgtgattctcatgcttttttttttttcttggtagattcataaaaatggtgagagtttatctttgctcagattgttttctgtgaccatcaagggcagtgccactatggtcccgaagcaaagtggcagtaatgttgctttttttctttatttccctagagtgtttctgggttgactcaaagcaatttgtagacacagctctgcacaaattaatatctgggagaagaaacagttgagaggaaaaaacagtttaagttgagatctacttggattgaaagctcagaggttgttcttgggtttctttcagctaatagcttcagaatggcctctgagcaaagatagatgtcgaggcaggctttgttgtttgttggttctcccttgcaggcagaggctaccctctgctatcaaggctaaagcattccaggagctctttgcaggcttccttacagaagaactgtgggcaagtgaccctatccaggtcagcgagatataaaaagatgtggttttcttcttaacagaaacccatggagagagaattatcctcccttctgcattttaatatggttatgtgaaggcatgaggtaatgtgtggagctgtggcagccatcttgtgatgggaggggatgggatttgagggatgccacatgaatcagggacccagagccctgataatgttaggtcatctatccatccctggacttgtagtgtgagaaataaaaattcctttaaaaaaaattcaggccatttttgggtattctataccttgcagaggaactatcttaactcaaatatatagttacatgccatataataatgtttcagtcaaggacagaccacatatatgacaatggtcccataagattataatggagctgaaaatattttattgcctagtgacattgtagctgtcgtaacaccacagcaaattactttttaaataatttttttgtagcagtgtagagtaattataaagtctgtagtggtgttcattaatgtcctaggccttcacatttactcaccactgactcattcagagcaaattccagtcttgccagtttcatttatgataagtgctttatataggtgtaccattttttatcttttatactgtatttttactatacctcttctgtgtttagatacacaaataccattttgacacaattgcctacaatattcagtgcagtaacatgctgttcaggtttgtagcctaggattaataggccatattgcatagcttatgtgtgtagtaggttataccatctagataaatatactctataattgcacagtaataaaattgcctaaagactcatttctcagaatatccctatagttaagtggtgtatgactatagatagatacatatatatttctatgttaatgtcatgacttatgtatatcaaaatactgggaacaacctgaacacccaacactggggaactacttaagtgaactcaggtatggcagtacaggttgcaaagaacagaaggagttgagtgttactttgaagacagaactagaaagacctggttatggaagacggcagagtgagactaagtggaggaattcaggacaccctggaaatttggaacataagtaactaggtagatagttgtaccatttactcagatggggcagaagagagaaggaatggccatatgaatacaatggcataccatgtagctgttagaaatgatgtagtcaaggtgtattaaggatgtggaaaaatgttcttaatacatggtaaacaggaaacgaagaaacaggttaaaccacaagatagtttgagttacttttgttaaaaatgctaacatgaattcaaaaaatactggataggcccaccatgatattactagttttctttggctggtaggattatgtgtggcttttaattttttttttcactccgcctatcttcatttaacatataagtttctaatctgaaaaaagctataagacaaaattctattcatatggccattccttctctcttctgccccatctgagtaaatggtacaactatctacctagttacttatgttccaaatttccagggtgtcctgaattcctccacttagtctcactctgccgtcttccataaccaggtctttctagttctgtcttcaaagtaacactcagctccttctgttctttgcaacctgtactgccacaaccctaactgaagttatcattcattattttcttgtttgaaccccctgcattacctactagccggtctcctgcccttcattcttgccactctcagattcagaaaattattattttttaatattctagcttaaaatacttactagtctttataaaggccagtttaagctggtttacacactcaagcttaaaatacttggtggtcttctttatataggccagtgaaatagaataaaatactaagaaatagattcacttgtatatgtcagaatggacaagcagatcagtggggagaaagatggaagctagtaaatattactgtggggctacctggttattcttgtggaaaagaattggatacatacatgtcaccatatgcagaagtcaatcctagaatcataaaaagaactttaaaacttaaaaaaaaaaaacaggaagaatcttttttttttttcttggagtaggatttcttaaaagggtcacagaaagcccaacccatgagaaaagattgatagtatttaatactcacttggaatgaaaaacatctgttcatcaaaagatgctttaaagaaaatgagaagacaagccagaaaccaggagaagttatttgcaacacatgtaaccaaaaagtgattatgatccagatttataccagttaaagagcaactaaaagttcagcttaaaaaacaaaaccaaaccccaaaacccaccgtagcctagagctctaattattcttaaataaaagtcaaaaacccttagtgtgcacagcctgattcccagaatatacttgtattctacccgacttccccattgctcactggattctcactaggcttccttttacttcactggtcacagcaagcgtctctcttgttctgggtcctctcaactgcttttctcttgcttctgattctcccagctgtctgcagtgtgctgtcatttgcatcctgcaggtctcagttcaaaggttatttccccagaggagctgcctccatttatttttatgaatgaatgattgcttaccccttccaccctagttgagaaagggtcctaattgggcagcaggtacatcactggactaaatggtaggggcttgtgctccatttcttgatgctaataccatctcccactgactctctcacctaggagatcacacatgtgagtgttggcctggtttagcgttcttcaaattgcagctcaagagactcatgagtgtacagtgaagtctatttagtgggcatagtggactttttttttttttaattaaaaaagggtatagaagactatagaaaatattagcgtatgttgcacatagtagtgtttggtaaactttgttaatttacacgtatattctatgtagacacacacacatatgcacatagacacacacacagaaattgtggtcaaaattttggaaagcaagtctcctagatgacatctgaggttcattccacctctgacgttctaagatcaaatgcaggattactgaacaacctaaagcagataggctttttaaatgctgctttacttaaaaaaaaaagaaaaaaaagaagaagaaattagagatggtgtctgactgtgttgcccagattggaatatagtggctattcataggtataatcatagggcaccacagcctcaaatgcctgggctcaagtgatcctcctgcctcagcctcccgagtagctgggactacaggcacatatatgccactctgcttggctcagctttacttttttttaaagtactctgaagtaactaaagaaagcttttctgagtacattcccttagcttggtgactttaaagactaaaacttacaaaatagaaccattggtatcagtaagatgttaaagactaaaaatttttcttaagtagcttaaacaagcttctgggaaattgtatttccattattaatttgcttagaagtacaattactaataaacttttggccaattcataaaatacgctaacgggatcactaatgggaaagttaataaatcagggtttttgtagttttctccttcttttcttgccattattacttcatgagttaaactacaagttaggacaatggagccgctggcaaagatctcatgatttgcttgctttggttgttacttgccatccccttaagaccagtccagagatttggaggactacagagatctgtggtttgtttagcttgagaagcttatcctttcagtgataatcttacttggattgctctaaatgcatgtcttctccctatagtaaatctcatgttgtaagtcatcaggaatgagttacagataagcttagtttgaaaagtttcttcctttgttctctttattcttgcttctttccatatattcacttaacctttagctttttctagagatatttgttaaagtaaggtaagaagggcacatcttattttcccagcctctacaactacagagaaattgaatgaatagtagagcaaacactgtatactcgtcacctagatttaccggttaacgtatcgtcacttttgttttctgtctctgtttatatactcatacaaatacatgtgcactttttggaatgtgctgaactaattgaaagtaaaaggcaatcatgctgtttcaccccctaatatttcagtgtgcttcttctatgaacaaggacatcttcctgtataagcataataccattaacacattcctataccagtgtgacagctcataatcatatttctccaattgtccacaaaatgtccttaatagcacttttttattcaatccaggattcaattcaaaaattgtctttgctgtcatgtctttttactcttctttaaatcacagtgtccgaaagcattttgctttttaagatattggcattttgaagattccaggccagttttctggaatcttccacagtctacatttgtctgtttgtttctgattgttttctcaagtttagatttcggttaagtgtttttagtaggaatactaactaggtgatgtgtatttccagttgtatcatattactggtgaagctaggtgatccatggggtgatacctgggcactatgaataacctgtttccctgcaactttttacccagtggttgtaatatcgatggttgagtctgtcttgcattagttaatacatttgacatggtaaaacagtaaattttaagttatttctttcctttcaaattaatattctgtaaagaagagcttttcctgttttctcctctcctcgctccctcactctctgtgcatatgaaaatgtgggcttctggtacctttccttaatactagcagtcaccatttattgagtgtttattatttgccaaacactgtgtgatatggtttggctgtgtccccacccaaatctcatcttgaattatagttcctacaatccccatatgtggtgggagggatctcgtgggaggtaatttaatcaggggcaattttccccatgctattcttgtgatactaagttctcacaagatctgatggttttatgaggggcttcccccttcactcggctctcatgcttctgcttcctgctgccacgtgaagaagggcatgtttgcttccccttccaccatgattttaagcttcctgaggcctccccagccgtgcttaactgtgagtcaatcaaacctctttcctttataaattacccagtcttgggtatgtctatattagcagcatgagaacggactaatacgctgtgctaagggttttatatggatcatgtcatacaattcttccagcaaccttgggaggtagattttgtaactaactgttctcgctttttacatgaagaaacagagcatcagaaatgttaaatgacttgttcaaacaggtaataaggattccagtgactctgaggccacttcattgtgatgcttcccaaatgtcagccagactgtgctttctcacacctagcccgacttacagacaggagcgaggccagcagaacaactgtccatagtaaatagtgtcttcacaagccaaggagtatggctaccagcccagtcctgggcccttccctgtgcttgctgctctatttcagagtctgttgcctcttcctttttggctcctttcaaggtctgctgagtcttcccttacttctctcctagaatggaacagtgtctcctggttggattgaggcacacgtgctcagagcgagcagctcacagcttggctagctcctggtggatgagtagtatggttgtgggcttgggagacagccagccttgaacttaggagctggcactggcctgagagtcattatctgtctctagtccttggccccagagtgccctacatcttcacctattttcttggggtaccaaaaactccattcctgaaaatgttttttgaaaatgtgttataacctataaagtcattattcttaatgatgctgagattgtctcaagttttgccagtggggatcccttcaatttggctcattgtccttttgacacaatatccgttagtctagatagctttcttgatttctggcacaagatatagcaggttcaccttgcacttgcactttttttagaaaccaaaatatgagcacaaagtgtgctcattgctactgagatgttgttgtttctaaggaaggtgcgtgttttttgagaattattctgctgttgatagcgtagtagagttggagtgggggtgaacaaggaaactgctgcctggccttcaattggaaatgcccaaaattcctagggatgtcagtgactgcagctctgtccttgctggctcctgcttggtcaatgacttgtcagtcccttgtcatcaagcagttggggacctttgattacaaagaactcctctttttgctgacagaaagacaacatttcaaaagacatttcttgtgaattctattctccagtggtccttttctgccctttgtgccaaacttgaaactgcagggaaatctttgttacagagaatccagaaaagacctattaacagcattgaggctgtgtctgccacttcatggctgtgtattttcagacatcattgctatttttcagaattaaattaattatcttaatggagtacttacttgcttaagtttaaagttcactccattttaatgtttattttcttgagtggcccatcaaggaaataggaagaagtagtttattttgtattgtggtttgagataagagaggtttttatttattattaattttaagtaaggcacccaaagataataaaggcctaggaaggatagtgagaagaattttgccatgatacatattttcctcaataggtcttcctcagtggtggttatgtatgtacgtttattttaatactctagtctatgccctctttaattctttggcttgatctttgttttgtttttcttctaaagcctatatatatatatattttttttaacctgctagtttataatgtatcttaaattacatccgtaacaaatctgtgttatactgtgtactcttaatgtacatttcccttccttttggtctttaaaaagcaaggggttttatgtttcttagtgggactgtaagataaagtagaatatctttgcaggttaattgctctgtaattaacccagatggggcagagggcagaggacagttttgacttaaccctgttgggaaacatcagcaagctttcactttactgtagagcaatccattagattatggtactctcagctacttgactaatatccagagaaaccttactccttttccagggaatcctgagttcctctgttgataagatgacttaatagaaatatatttttaatgaattcttgacatttgataaattaaggccatttattttagcagagaaaaaggtgaagttctacttagccattggtgacttactacttttatttaaagaagatgttttctaatatgttttattgactaacccttatcagttataaaatacctgctactctagttctaggctagttcctaaggtgaaaatttgcaaagaagcttaaaaatgaccactaagtacagaaaggggtctcatttattaatgtatacattttaaagcctactgtaatattttaatatctctgtcatatgccttttggtgacttaatttcattttatcttatagtttaatatttttaaaacacttgataaaaattgctcccttctacaggatgcctgagtataatttttctgttttgatattttgtatatgtataaaacggtgactgataaacatgaatttatggtagctgcctctcatttattcttctttaagatcaaggcatatactattaagcagtatgcctgtaggttggttgttaccattcataaaatctttgaaaggactttataattttggtataataacaaatgaaaaagcttctctaaatgcaacgttgtatgctggtttggattctgggacagaaaaatgacattagtggaacaactacagaaatctgcataaagtctctagtttggtgaatagcaatgaactgatgttaatttcttagttttgataaattttatggttatataaaatgttaacattagtgaaaggtaggtaaagaatatatgggaactctatatgtagtagaagcttaactcattaaaagctttgaatatatagagacatatgaccatagtttgagttcattaattagttcagggaaagtttagtggtagttatatttaagcccatttataattcataattaggaatttaaaaattaaaagaccgacaataaaaataaatgcacttttcatatgagggcaccaagttctgtatgttcgatcactaaaaatatcagttttactcattttagattattgctgcttaagatgtccagaataggcttatagtacaagcagcttttttatttcttctagtttaattttaaattcaaaagcttgaaacatctggaagaaaatagagtcagaattcatcagtgtataaaatcatgctgatattagttggtaatctgtttgcatacctactaagtgtgagaaatatctaggcactatgggaaatattttttaaatagctctaattaagaggtatggcatacacagacttgtgcacacacacacgtagcacatatatatgtatttaaaaagtctttttttgtcttggattgttaagtatcttaatggtattgagcttaagtggtgtcagaattgagagacagtggtggagattactttgagccggggtgatgagggatgtctccaccgagaaagtaggcaggagtttagcttggaaggatgggtagaatttatacatatagagacagatgagagagtactctgtgggtgtgtgttgattagtagtaaagctgagccctaggagtttagatgtctccctaaacagactagtgttgcgggcagagagttccctggatggtgttgcacagtagggtggagttaggctgatgctagtttatggaaagtcttgaatgctaagaaattggaacttttgtttttaaataaaagggatctgttgcttttggaaccagagagtaactatcaaaggagtattttattttcagtagtatcagagttttgtattgagttctcgctatgtttagggaactgagctaggtgccaggggtactaagaggcctgagactggtctcttctctccaaagtctcacagtctctggcaagtcagggtcttcttatctgtaaaaagatgaataacaatgcctttatgaggcagtatatgccagtgaataatacagggagccctataagatgatggacacttagattgcttggagaaggctgtagggaacaggtgaaacataagctgagctgagataggtgagtacaacttagataagtaatgtggaggttgttctaaaaggtgcagaaggatatgaatttagggaaaaaaaccacaggtggagaaagcagtaagggttcattgtaactaaaataagctgatggagacttaaaataatcagcatgtgaggtgatgagtctggtgagtatcgtgacaagtagaaacaagggattatttgagaatcttcaggacttggcaattatcaatataggatagcacagaaggataacaaattgttgatgaccagtaacttgagccagtagaggttgggttttgtgtcacacattttcatttccaggtaatgctggacttccaagtacaattgtctgacaaaaagttagaatgggggtgtcaaagtttggaagacaattgtgggtcaaaggtggataaagatgggtgaggccagagaggagcaaaggagctaaaggagaaaaaatcaagaaggatatacaactgctgcattcagagagccaaagaaaggctggccatcgtgatgatttcagtgttcttgaagcaggtggaggatatactgtctatgactgcagatacatcagaaaaagaaaactgagaaatgctcagtcacgtgtgagtggtcctcggttttataagaatggtgggcctgcagtccagatgatcaggtctaaggagtaagtgtgtgtgtgtagaggaggggcttgttgaagtggaggcagcagatttacctcagtgtttgaagaagtttgggtgtgcgaagacagggacggacatacatacatacacacacacacacacacacacacacacacaacaaggcagtagttgaagagggcaaaagaagggtattgtagttaaatttaacaaacatcaagtgccagttttgtgcaagacactgtgtagggggcagtggaggacacaaaaagtgattaaaatatagtgggatttctgttcccctgaaaagtactgcctcaagttcttttgactttagatgggcagttcatcttaaacaaaatgttggacaaaatcagtgatgaaacaactgaggatgaaggagagttggagagttgaaggagcagtgaaaaagaatggaagaaaacatgatgtgcaggtggagaggctggcctttgaaaggaaaaggacccttctctaagattagcatacaagaggaagagaagaagctcattttagaactgttctgagatagaataaaaccaaacaaggacctcaggaagccttactgtgaatgtcatgtataactatgatttctgcctttgaaaagttctggtccaatggaacgatgagtcggtgcttattttttatcctgtaggagaaaaagaataaaagtgacacacctggatcattaaaggtattgggctttggctgagggctttttgttgttgttgttgttgtttttttgttttttgttttttgttttttttttgagacagggtttcactctgtcacacaggctgggatgcagtagcacaatcatggctcactgcagccatgacctccctggctcaggtgattctcccacctcagcctcctgagtagctgggactacagatgtgcgccaccatgcctagctaatttttgtgtttttagtagacacaggattttgccatgttgcccaggctggtctcaaactcctgggctcaagtgatctgaccgcctcaacttcccaaagtgttgggattacaggcgtgagccactgcgccaggcttgggtttttttttggtctaatgtaatagatacatttttaaaactatcaagataatgtgtgaatatttcagggtctgcagttagctaggatttgtgagatgtagactcatagagcttagattctaagaagggaggtaagaaagatgagcatgcaggatcttaataaatgcctgctcattgacctctgatctgaggtagaaagtggctgtgtgtccaaaacatacacaaggagtattaggggaatttagaggagaaagaattggagctatttctgtttttgaaacaaatttgccatatatttacttcaagtccctattttgttttcttcatagacgttattttctgcactgttaggaaatataattttgtgtgcatactttttgatccccactgaataacagtatgtaaagaattatgaacatgattttggccacttaaatgaagagaatcaccttatctcaaaactacccagttaagaaaaccttcagcaggacttggagcgtgggtggggcttggttggtggagtatctggatgtggctcccattttccattttctgcttgtaaacttgcttttcaaagtgttcatactttattctattgactatattttaagtgcatgtagccagaacataggtacaagtcagtaagagaaaagaactaattaatactgtacttggacttttgtagtcaaacataggaagacatgtgggagtggaagaaaataaacctaatttggagaggagaaaaaaaggtccactttttttctctgaggtattaataaaagcattttgagatttttcttggtggaatgatcgatctctctctctctctctctctctctctctctctctctgtccctgtccctatctctagatattttgtgaaattttgcttggaaagaaaattatagaagggactatttggctatcacaggttaggcctggaatgtgatttctttaaaggcaaaaactaaaattcagtcactacaaaatttaacctgagaattactcaatacttgttgtcatacaatattgctaagcagggtttgagttgaagggattcctattgagtaatacatttaatgtccttccttcaccaccaactcctcctctcccccacttcccactcagaagaggcagcaaggcttgcccaccgcggttcctgtagcagagtttgacgcagcctcagctgaggtcaagcacacccattccagcctcttgagggctttctctatgtgttgccagtgtgctggtaaaaatgactttaaactcttgtcagcgcagttactggtgcatgcatcacagtcccactcaaataaacctgtcacaacacagagtcggccgctagagaagagtacaagggcaggcctctagcttttcattcgagcatcactaaacgtgcacagagtgcccaattatttcagcattattgagcaagcctacaggaggacccaagccttgctacattagattttctttagtaatttgctcaagtaccgctgaggacacttaaagggcttaaaacggtggctgcaaccagtttccttttctgggttgttaattcaggttttctctttcaaattaactctccctgcatgctgtgcagtggttctgggagaattgtttaacactaattttctcaattttcagctttttttgttcaacataactgctttaacagttactcacgtatatgttttgattagaaatgtatgatagcgaggccttattttattttttgagataaaaaaagccttttatgaggtttgttaaagaaatatgtttgcatatcaactattgaaagttacttatatactttcaccacttaaaaattaaattatttatattgcatgtgcaaaacctccaagtataagaaaggtagcatttattgactacacagctcatttgctccttcccccttttaaaaatatatatatgttaatagtaaatcttacgtaggtgttggcttttttctttttcttttttttttgagatggagtcttgctctgtcgcccaggctggagtgcagtggcacgaactcggctcactgcaagctccacctcccgggttcacgccattctcctgcctcagcctccccagtagctgggactacaggcaccagccaccacacccggctaatgtttttgtatttttagtagagacgggatttcaccgtgttagccagggtggtctcaatctcctgacctcgtgatccgcctgcctcggcctcccaaagtgctgggattacaggcgtgagccaccgtgcccagccggtgttggcttttttactgccgatttatgcctcctttctgtttctcttggggcaggggttggatatgggggcaaattcaatatctgtgtttaatttttcacagcagcaacaactccaggcccagcatttatcacatggacatggtctccccgtacctctgactccacacccttcagggctccagccccctgccattccacccatcggtagcagtgccgggcttctggccctctccagtgctctaggaggtcagtcccatcttccaattaaagatgagaagaagcaccatgacaatgatcaccaaagaggtgagtaactctcttggaatgccaatctgagatgacctacttgctgctgagggtaggttctggatgctattgtttattctctctgaatttagttttaccagtgactaaacaaaggatttccactggaaggtaaattaattactgcaagtagtcaattgccaaatgatattctagtggttggcaagagctaacatactccctagaggcagaggggcctatttctggttattgcctttgatttcttgctaccttctatgttccccaggtctaaatcagtaatgaaatcccatgatgctctgtttgaagtagcatgttgcattaatagttaactttgactgaatttattttggggaatgtcttgctgataaatgctcacttgatatttgaccaaatcaattattatttataaacaaatgagcctatatagagcagtaaaaatctcacaggtaagaaaacaatttcagtagtcttagtaattaagaaggtacagaccaaattaatgaaatctgttggtttaactctctctctcacccagtctgtttagaagcatgaaattaactaatttcttcctagaagaccaacataattgtttatgcaattaattgatttaaaggccagttgtgctccttctaggttgatttccttcctccactaaggtagatgatggtgcagaaacattttgatgtgactgttgtttttctttggtgcttactgataatttttattagttgatgacagaaatgcagatgaaaaagtctctcccagcattcctttttgggaatttacttagcacaagggtggttcattggcttgaagggtgtgtttcataattaaaagctcatacccctgtttcagcatccttactgtgaattataatattaagtcagtgatttttatcacatatgcataaatatccatctctgatattaaaaacactgtaatttgtcatccagttatcttaatgctatggtacagagttgatgcatgattgtaaatactttgaaaaagtctataaggagcacagataataagaatgtccagctttggttcttctgaaattgtgtcaaaggtagattggtactttatgaatttggttgtgcagtattaataattaattttacagcacagttgacatctgtgtaatttattatttagcagagatcaagtttgataaatcagtatgattttatgtaaactaactagtacttttcttttcttcttcccaccactttatctgcttgtgttgctgctgttttgcatatagacagagactccatcaaggtaggactcaaaatttacagactaaggaatggcttaaaagggctgtaaatgatttgaatgaatctagtaaagaattctttgagatttagagaatgatttcattggttagtagtggttaactgcatttttaaaattactttcaggtgtgtggttgattttttttttttttttttaaaggtcccatttctctatcagaatcagatttgttgacccaggttgaattgcaagatctggcttgcattgctcattttattatttgccatgtgaaaaaaaaataactgcttttcttcacttaggctttggctgtaagataacaatgaaatgaattaaataaattggtttgtaaagagatacatattagtttcatatttgaggaaacagctccaacctacaaaaatatttgtttaagtgaatggtgcatttttttttttttttaccactagaaataattttctcttttaaatttaagtgaatttttttcaccaacttttctttcaaattaacattttggtatctggtataacaagttaattctctttaggttttgcatctgtcttatctgccttttgtatctctttatagacaagttgtagggaaagaggaaaagtatttaaggtctaatgatttgggtatgcttctatacctccagaatgggatgtgctaaggatacctgaagttatttagtaagcaaacaagaaaaataggctgccatggcaggaaatgagtaaggcatgaaaattaatgtgatcacttatgaaccagacacaatataaatacaccattgtaggccgggcttggtggttcatgcctgtaatcccagcatattgggaggccgaggtgggcggatcgtgaggtcaagagatcgagaccatcctggccaacatggcgaaaccccgtctctattaaaaatacaaacattagctgggcatagtggcttgcgcctgtagccccagctactcaggagtctgaggcaggagaatcgcttgaatctgggaggcagaggttgcagtgagccgagatcatgccactgcactccaccctggcgacagagtgagactctgtctcaaaaatacatacatacatacatacatacatacatatgtacaccattgtattatgcgtaattgtattacatatgccattgtgttacttattggttagaaggaaaggacagttctcaaccattggccgaggtacaaatgctgtctatttctttatatcttacaacagttgaatgttttggagtataggtagttatatcttgcagtttttaatggagctatgtatatgaatgctaaaattttctcccagaaccactgtgctagcactttgaatgcctttttactccttgtcgttttacaattaaaggaatttttttttcagagcccttaagtaatggaaaataaaacttgagcctatctgttttacccttcaagaatctttgtaatttgaaagggcatctgcactcccatgtaaatgtcaacatttacaattagaactgaacacattgaattatttaattatgcatttgcagttgtgtattttgttgtatcatatgcatatcagtacttagactaaaaaagcattcttaaagtatattaagtgtttttcacacatgtgtacttaggaagtagtaagtaaatgcagtggctaggattaactgataccagcctttgaaagcctgtccagttattctgaggtcataatataaacattccctgccttcttattataaatatatacctttaggcagtccagtgaactaaacaaaagcctccactcccagaagactgtgaaaatatttatacttcagtgtacacttttgtgtcaattacattttcttattccctcatgcaagagtaagggtgtgttttgaaatcatcaataatcattcagggtgagcctggaaatgagtatctgtatagctagaagccagggaaaaacaagaaaggctgatgattttgccttgatttattatgggatggcatctataaatagatgttttggttgggtaccattctcaaatttgaagttgtattacgtcaggtctgggactgtcctatagttctacaaggtgagatagtttgcttatttttctgaatgtgttctgtgatgctcagagaagcagttgtagttgcttgttccatcgatcgtcctcccataagtggttcctggttaagaggggctttttatgattgtctgctgtgtgactctagatggtttttatcagccagagcgtgccagttgcctgcagctggagtcgagcttgtatgaaataatttatttatgcaagataatgctccttaacatttaacaggtaatgaacgtgacataaatttccttcttgcttttaatttttccctttcctcttctaatgtgcaaacaggcagctctggtactctaaataataagtaatttttggccatctgtcaaaaggaaatttcaatacaaatttaaattaatggtgcctgaaattttttatagctcctctaaaagcctctaatgtgcagaaaattcggaatctgctggtagtaattagtgttgcatgtaatgaggatgtgggcaatcttatacagccccagtggaacattttgatatggtagcaaaattttgatttatacaaggttgtagatgggtttgattgtgagagatactttaaaatgttttcttgacgttacagattgttaaacagggcagatttcagaatagcttataaactataaatttaaacttactgtaaagatttaagtaatttaggtactttacctttagatgccaagtaaaattcacttgttaacatgttgggccttttttttcctttgtctttctcttctgggaagttctgtggccaccaaattgcacgctgttggctttattgatctctttttctatagctcctgtagccaagttcattcctaagcctgttatttgcagacctgtatctgaagtttttcaacaaaggtggagaatgtaaatatggatctaaaggagaaaacactgtaggagcccaagaatcagtttccttgatgatgagaaactagaccagtgtgtgttgtagggctgttgaagtcaggagccatggcacctgcagccttccttgcttgtcacttggctgtccagtgactccatgtgcccaacagtaagtcccacatttgaggcctgaaaatgacaagaaacacagactgtgatccactctcacccttaatggtagggcagaaagcccaaatttatctctccaaaaagaatccaacgtaggctaagggggagtgttctcaccatcttatgtagtatcaagaaccatttctctcatccctagaaaagtcgtaagtgacaccaaggaaatgttttctgaggtgatggaatcttccattgcccaccccctctcattgagggctgaggggtaaaagtgatgggctctaaaatggtgtcagaggggacattcccttgtgctgccaggagcttcccacttgatggaggttccagttcattaagaggagtcagctgcccagactgaaccagtgctattaggttcctcatagcactctccagttcttttctgagtgactgaaatgagggtaatgattcagagctgtgaaggccaaaattgcctgaaacttggtaagaatctgaggttcagaaatcgtcttatttcccactccgtcccaaatgtgtgcataattccaatatcaggtagcaaaaaataggcaccaaaatcaagaccagcttaaatataagtcgcaaaattcactatcaccaaatgctcattagctccgtggcctcaaccaagttgctattattgtgcattctttattactttgtaagtccttttcatgtatctgcctggttctcctgtgttttatcctgagtgcaatagccttctcaagtcacatctatgagggatttgccttttttatctgtaaaatatagcacgagtactttttctcctctgtgcctatgcttacccagtacaaacattttttccatctgagtggtggtgtttttatttttgttatttcattggaatgtcttcaagcccagagtgctggatgcatcatcaaagagtatgatcatttttagtgacttgtgcagtgccaaattgatctcctaaaaccctgtactaatttaaaatgccaaatgcaatgtttgaatatgtttccacacaatccgccaatatggaactttatagtttttgtaatttttgttggcataatgagtatggatggtgcactttatttttttaatttacgtataattattttttagctaaatgcttttctctgggtatatacactgtttttttcctgtgcaaattccttgattttgtttaaaggtttttataatgattcattcattatttgtgtttaaggcaatgcatttttattctgccgcatctgtattttggggcatagatgactaaaacatcatacattgcttttttctatcccccatttattatgttgacaataaaggtttatcagcggaaaattagaataaggttgtttttatgttcaaattgaagggcatgattcaggccaagaaagcacttttgcctcattaattgggtgttaaccggtgaatgtgggtttttagtctgaattaacagaatgattacttcatacacccctttaagtaggagttttaccgtttgggagataacttgctgggataaatttgtattactccagactttagaagtacatattgtaaaaaggcaaaggcataaaataatagaaaggtagattaaaaaggggaaatcattgaaatccacagaacactaaagagtgtttaagcaaacaaaacagtcatggacttttggtatcttctgttttcccctcagtaatcagcaatctgagaagagaagttgtctaattaagggctgtaacacttcagcatatccactgtaacctagggaaaaataaggtgggtccacagtgtccactcagtcctactgatctcctctgagcagcccccactgcatgtatagctcataggttagattttgctggtgaaggtaggtgttatgcttacccttatttcatacatgaggaaaggtttagaagtgtgaagacctgtcaaaggtcacacagccagcgccgccctcaaaggaaagctctttgggtaacccagtttcattctcagttattaaaaatctgaaacatactacaaagtacaaagaacgcctcatacacccagcaactaggtacaagagctatcaatatgtagccatatttctatctatactttttctttgccgaagtatttgtatgctcattttgctcctgtgtacttcaatatgcaaaatgaacacattatctaaatagtgggcccttttttttttagataaccataatgcctttaatcacttagtaaaataattctttgatatcttctaatacccagcttataatcaaacttctttgattatttcaaataattggtttacttgaaatgagattcgaataggattcattttattttgttgtgatctctgttaggtctctataaatctttcttattaaaaaaatttttgttttttgccactccctaactcataatttccttctcaaactaatcttcgatttgtcctcttatacaattccacaaagcagattaagactcttcccctcaagaagctaaaaatttaggggaagagaactttacttagttagggcatggggaatcagggataccacctaataaggaaatagaagtacttaatatatttttaaaatcatattttaaaatatgtttttaaaagcctatcttgagcaatacttatttggacagtggatttgtatttcaaatacatcatagcctgtgtttcaaggttaaagaatagaaatagaactctacctttttacggtcagcatacatttctagatatcttactcccttgattattggtaaaatccatttcattgttcatcaccaatgtatacagacaaacctagatttcattctgtcccattctcccatcataaggaaaaggcttttcctggtgtaattcaccatgaagtattcttgacaccacaaggaagcacactgaaacatttagaatatgagccattctgtaggaaggctatgccaggttctgcaacaatcctctctaccactgggtaagctgaatatcaatagacaagtcacttaacctccatggatctcaaggctgtaactcaaggcattcttccaagtatttggaatgtagctattttcttatgtgttatttagtcctgtcctagaaacaaattttgaaataaaaatcttataccataggttatgtttcagcaataaagttggccataccattagccaagtaaacacagtggttagaagtgaggaaatcatttgaggggttcggtggtagggtgataaagtatgcctttcaagcatttaacgttataactctttcaatttcccaaaataacaaaataagatggtaatttgaaattaagtgttttagcattgctattgctttttaattatttgtttacaagacttttaggtatttatttctaccatgtattttactatttacagttatcaaggaacagttaagaagttttgttctatgaatctatgatgcagtaatttgttcagtattaattgatacctgcctctaggcatgtaaactgtgtgaaacgtaacaggtgtcctaattctagaaaaatgtgtggtaattgtttgtttgtcaaacagatgaataaatatctttagggcatagctggtcctcaggtggtgagcataaatggattaatgatgtgagtgactcggggagacacgcttgttttgcagcaccctcctccgccgatcgctgaagcagaacaaatactaattaacaggggcggcctggttggcaggttggctttctccagctgatttggcaaaatggtttattcctttccctccataaaccatccctcttagttattagacattttcatactgatgtttagttaatttctaattttcttaattaggatgcatttcatctcttgcaaaaatattataacgtttatagttaacatttttaaaaatttagaggggcctaagatttaagttttaatagttgacgcttgaatttcaaaaacatttgtttctcaaaatgtagataattcttccaatggaattattccaaagaatcgttcaccatcttttttttgtattcttacagtaacactaaccccactctggaaaaattataaaatcactcatggggtagtttaatactcttgttcttctttcttgaattatttctgcaacactttcctctgtccaacttatgtattttgttctgtggtgatttgaagtagctcagctatcttctgggttaaaagactttctacgcgtaggacccaccactttaataagggctgtaattttggacttagagagtcatatctgattactgccatggcaactgccttgtgaaagggttgaagagaattcaggcttcatgagagagtaatagaaaggaagtttgctgaggagctgagtagtactttctgaaagagtttttgatgcttttaaataaggttgctgttaaatgaagataatacagttatttcaaaactcagtaatgctgcttagacttggcaaatcaaaacttgaaatgttagcattgaatacttagttgtttttctttgaatctaaatattgaataaaataagtcacattgctttaactttatcagattattcattatttagaaccaatccaattatttttgtatgtaataaattttactgcttaaaaacagtgtaagctgagagttctagtattgtaatgtaacataagaaattcccgctcatttgtgatagttggaattggtggttaagtaccctcctcctcccaacccctgggttcagttttgcctctagttttccttcactagaaactggagaacaacacacacatacatgtaatccgctcacgtgcggtccacctttcttccttcacactgtttaatattccatcccctctgcatccactaaatgttcgtgaaaagcttacactttccctccccttttacagaaatgcaggcagtgaggtggaagttaaaatgtcttaagtattcttgttgtaagtgaactttctaagatatggtgataagggtgagcatgaggaattctttttcatggaaatggactcattatttaattgtatcatatcctgaaggattcttgaatcttcttttttaaattgctacttttcaagttgctgacttcaaatttgagaatagaagagggctgggagaggggaggtaaataagttagtgatgccacccagtgagagaagccagtaggcttatataataagatctccttgttatttattgctccttatggtcattttaattattctagagaattttgagaattctattcacttatctttttttaaacttctgtttttgtgagcgacatttggccttttgaacaacaaaataaaattggaaatgctaatgttttgagccaactaaaggaggaaaataaaaatgtcaccatggtaacaaagctgctttctagatggtttcctaagatatgcctgaactagaagcagatgtctgatttgagaatcttgcctccttcgatgtaaacaaataacttctgggcaggtgttggaaataatatggaaatcctattaaggggccccgggttcctgtcagtcaggaaacccgtgccacaaaagggctggttgtcgcataaaggagcagagtaaattctcattaggcttgagcttttcccaggaaatgattgtctccgtgtgttctttctcctgtgaatctgaatgtaagctgttgcttctattgatctattcactggctttatttttctcctcttcattccagatcctccctcgcccccacaagcctgtgttctccccctcacccaccccttccctttagattaacacttgatctgtgctactgctctgagagtcgtgacatttgtgattttaacctcccaacctgggtgggggtgggggtgggggtgggggtggagaaggaggggaaagttagtcttgttccctcagcctttttcacaaagactctggctgattgggactcgcacagctagcggcaacggcaatcatgaagaccattctgtgtacatttacttgaagttatatttttatgaattaagcagaaactaaaagcttgaagagacagctttttaggaacttttaaaaacatagatagttgtctggtaagcctctgaggctgccctgtccaatatggtgtagccactagtcacatgaagctatttaaagttaaaatgaaatagaattttcaaacccattttcccagttatattagccacatatcgagtccttagtagccacacgtggctgtagaaactgccaaaacggcagagatacagaaccttcccactgctgcagagagttctattggatgatgctgcgtctctgacagactctgatgaggcttgctggttctgacattccttctggctaaaactgactcctgatactcaaaagcaaggttcccctggtttcatagaaaacaaggcatgtgtgtattcgggtttgggtggttgatgtggttagctgcactaatatagtagtgatctttaaatggttgtagattttttttttttggtcacggaactggttgagcaatataaacatgggtcttcccaaaatggacccctaagagatgcaatttaatgtttctagatagaaagttgtggcagttttggggggaagggaggagtgcttgaaagctatgcataagggtgctctttataatactcagaaggttaaatgtggataaacacaaaacaaggcttcagaaaagccacactattattatgcagcgtttctcggactatagtccccgagacgcacttcataaagccaataaagcgcgcactggtggtctcccgttgccctagcaacgggccacggggcacagtgtatgtgaaatgcatgaacatctgtgaattaatcttttttagtttgttcttttcttggcactgattggaccactcgggcttgtgcctgtgacactgcgtgcagaggggtaatctggagcagtccccagggccttgccctaaagtggatagtggaatggaaagtgaagggagatttatcccggcagtgcattcagcagtgcagggatttagcctgacagcactctcagcgggatgttattagcttactttctggtgcatggggaaatgaataaaaatttttctagtaaatctgggcattattgggtttattgggttgccctgaaaaaataatctgcagagaaaattgaaataatcacttgtgtttgtaccacagttatcaggacttgaaagctgagttattccacatccttggcccagcccccgcctcagggattataaccaaaccatattggactgtcactgctctgaatgagactcctgaattggatgcgtaggctggaatctgatttgatgataaaatctgttagtaacctagtctgaccttatttagggaaattttaaactaagctggtgacatttttgcctttgggagaatagagcaaataatgactaaatacgtaagcgtccaggaacagtacttttgttagttagtcccccacccctgacctcttctgttctttccctcctcctgcctcccgctgccacttcttccctccctcttttcaaattgccatcctccttctagacttcagcatgactgtacagactgtgttcagttcctcctgtcaataccagatgttcacttgtaaactgttttgctcacccttgtcattttcaattcccttctcttttcttccttttttctctttgtgcctccctttttttttctctctccattcttccttatgggtcaaccctctttcctggggagaaatgaaagaagaatattacatatgaaatgtttcacgatggatgtagtctatttggttaattgttagggtgaaaatttcctttataacaaatgtattaaaacagaagttcgattgcattagtactgaaaggtatttaggtgggaagaactccttgtcaattctgtatatgttttcctttgattattaaaaaggcacagctatacctctgtatgtagctgagagatttttctgatttgttttttgttagacaactgactaaaaattatattaatggttcctgactttgaaacctgttggtattgacagatgaacttgcagtccaaataaaatatttaaatcagtaggtattgattcagcagctggagggcaaacaggcctgtactgcattgggggtgcacagtaaagattagatacaatcccttccttcaaatcatgttcctgttaaaatatggaattgcgatatgctgccttctgagtagaataaaatatattaatggatcgttcctcttcatttctcagagcttctggtgagtcctgaattctttaaaatgtgcatataaaaccagtttatgatgatgggaggactagctctgaaggcagtcttcccaggaagctgcccgggctgatgtgcaaatgcatgcaaacatgaacctttagcaaacactgacagtaatgccagtggcaacgttctgtcgactcccaatcgggatatgggccttttactcgaattcagaaagtgttttgtaggaatcggcaaaacaattgaactacagagctaaaatatttatcatctgattttttggcacttgaataccctcacttgcttttcaggtggtttctctgttttcaaaattagtaaataattttatttgtttttttgctgctcccatttagctctgatgatattttcttctttcaagagtatttttaaaaattgccagctttctagttgttacttgaagccagcttcagaagtagaacagttaacacggattattagagacctttagaaggaagtaaaattctcaaattttatttctatgtcttggactgttatttggtttttgaaagcacaattttttatgccaagaactaaaaatctgtagacactggtggtaaaaagtagaaattccacaattacaagtggcagtgagtaaactggctagagtgagaagcaggaatgaggtggaatgagtatgaatctctgctgtttccttcatctgtgtgtgtgtgtgtgtgtgtgtgtgtgtgtgtgggtggggttttttttttttgttttttttttttttttttttttgagaaggagtctccctatgtcacccaagctgctgctggagtgcagtgtcatgatctcggctcactgcaatctctgtctcctgggttcaaacgattctcctgcctcagcctcccaagtaactgggattataggcacgtgccaccacacacctggataattttttgtttttggtattttttagtaaagatgtggtttcaccatgttggccaggctggtttcgaacttctgacctcaggcgatccacccacctcagcctcccaaagtgttgggattacaggcgtgagccatcacgccccaccccttcatctatttttaacagtttcttaaaatctctgtcatgttcctatgtactaggctggtaaatagccataattcttgaattttatttttaacttttctactcttactgtgttttaaaagcagtaatagaaataaaatcagcactttaattagtgttgtagatatgtgtatctataaaagtgaaaatgtttaggggaaaaaaatgctgcttgttttcttagacacacaacattacatggaaacatttggtgattgcagtggcttcagcattttaagactgggctaccaaaaactgtacctgatacttaacctgttgggcctacccagggacagtgaaagagtccaaatggaggccctcataccatacactgaagtatttaaaagttataaatccaataaataaatacaccttagtgataacctgaaagaccaggttggaatttaaaattctcaggcactttggagttcattgctttaaccacgtgggtcctcacgtattttcttgtacacaccctagttcttacttcaaagcttcatcgaacccctacagctgcgcccagatctagacacactcaaaccagcagcttgatctaaccctgggaggcttcaggaagaggactgagactgagtaaaccctggaagtgggcctggggtgttagggcagggaatttcagggtcctgggtacccagctcatggtgtagaggccacggacaaaggctgtgtgtgggcatgcccccttggtcttacagggtgttgctcagccaactgagggccagggcccacgtcaggggcccttctccttctcgccaggctgcttggtttgtacatgatttcataagctatacacttaagaggaaagaaagggaacttagaactgttttatcttaaaataattctttgttaaataaatgtcaatagttttaatcaaaattcatccagggaattctaaaatataacatacatatacacatatatatatgtatataaaacattaaagataatctctaggaacagctgctttgacactgtgttttatagtctgtttacggatgtgtatgtttttaaaatactccattaaaaatccgaaatgcgtatcctgcctattggaagtgcttgtgaaaggaaggtggggagttggggtaccatttaaagctgagcaaggtaaagatagtgtggagcttcgaagtcaggattttctacacgaccccaccctcaatctggtccacatagtaaagattggatgctagtgaaaatgccaggcaagggttaggcctaaaaggattagtcatgaagattcgagattcttaaactaaagattatcactgggaactaactcgggtcatgatttctcttttcatctgcctttgttccttttatgcacttccacagttggacagctggaagtgccacagaaatatttgaagagccctatttagtagtttacgtgaaaagtcgttgaataattcacataacaaatgattagacaagcacttgtccatctgactgaattattctacatgtttgcccaagcaacaaaggagaacagcgtttcctcctacagagggtatacagtggtggtattgacccatctagttactgggtgggtttcagtcttttgttgacattgttgttaatgaaagcagcccagacgagctgtgagcagctgggctggataattgtgaaggattcatgcttgttgctgttacccccagtgtttgcagtgggttgtttgctttgacttttgttgaactgttgacaaaagcattagatacaaatgggaacaaataaagtggtgagatgccaggagggcttggcaggagtagtggttttctttctgactgaagtggaggatgtcggaacgtatctagatgggaagtggaaggtgtattcggtgtgtgtgtttagcagtttacccttccgataccaaactggaaaattttgttgcttatgtaccttggctcacagaggtgagagaatcaaggaggtcaccgtatcttgtaaccctcaaaaagccacgctctttaccatgccagtcaggtggcttgcaggccaagaatgttacaacagaaatagtttccagattccccctcctcaacttaaaacaaaattttaataatagaagtattttggactggggagatgacaggcatgacgttgaggtggggaggattaagaagaacagtatatgctaaaatagtatagctagcaaatggaagtcatctactggaacgcttttaatttgctttaaacaaaatactcttttgtatattcaaatggagagtagctcagctgttgtgaagccagaaaattaatggtatttttagtgaaatagcaaaagcatgtcaacaatgtagctgcagatgataatgctggcattttattcatgaggaattatcaatgcaggttactggacaacatagtgtgactgaaaatgattgagtgtcggagaagcccgccatccttctgctcgattatttcattttgcatttaggcttccccaggcttcatttgtgcatgtattttccctatcacaaaccaaaatataaagtctccctggcttaggattgtatgcatattttttcttcctttaaaatgtctccaaatgaaagttccccttgagtattgactcagaagctgaggagttcattttcagtgcacacatggtcagtggaggtggttaggcttcagagataggtccctctgaacagtttatctaaataggtctatggcagttgtttaaaagccagcaaaactcaccaccgtttgatagatggaaattgtcacagaatatgccttctctgacaagtagaagatttggaataagtagtgaggccagaaaaatgtttaaaaaacatgggcaagaataggcagaaactgtatttaggcaattaaaatgtcttttggaagagtgcgtttcagtgatagttgaagagttactaaaaatatatttgaatagtcaggaaaattaagctatgtctttttttttggcctgcagttttggtctgaggcgctctgggcaccatcactcacattgttttgttggtattatttcacctagtgtctgagcaaggaagaggctaaggcttcctttcaacattctgttctccaacctcatttattggattcccctctgctactggtgacaaaaagaatggattatacctttgtgtaattgtgcttgttccagtacttcatgtgaccaaatctaggaaagaataggaatttactgagtttgttaaaagtgggaatggcccaattgttttagtctttgcagcatcttaatcctagagagcagtgaccagtgagaagaggtcaggattttctcagaaatgggggcatgcgttacatggctgtgctccactcaaaaaagttacatgaatgctccccacgtttcagctctcagaagatattttgcttgtttcagtactagatggtcaaatggtaaaggcctagatctgaagttcatgaggaagaaacccctgaaatgacagacactgaatggggataaatgcatctatgtgattaagtagttggtagttcttccagggtttattactcaagagaggaggtagggaaatcgtgcaagtagaaaacttgaaaagactcaccttagaggggatagctaaagagtaaaatgagtaacagttaaataagaaaaaaaaaagaaagaaaaaaaaacttgagaagacaataaggcaagaagtttatcaccattaacaagccagaagaaagaaagagactacaccgacttgactcagcatgactccaaaattatgagaccctgggcaaaagcacaacaaaaggctcacaaatgaaaagaatgagttcaagagaaatttacttaggccacgtcaaaaagattggtacactgcaccctcaggcagtgaccagagatgcaagggtaagcatatttttgtaaaagacctgttttacagacagatatgcctcagtctttcctccccctcctttcccactgctcaagcaggtattcatgtttgctgtgcttttaaagctaaaatatcacccttgttaacggtgactcaaggtgactctacatactctgttcaaactgcatttcttaaggttgggaagctggtgtgtgttgggacctgtctacttctgtgcatgtggcatgctatgaactctagacagccagtaggcaggaaacagtgtagcaataccagctagacactcatcctctggaaccaggtggtctgggttcaaatcatgccttatgctatttaccatccttgtgatttttggcagtcttcttctctatctgtgtaacatgggagtggtaaagttgcccaatatagtaggtccttattggttttttttttgtttgtttttttagtgtacagtatgagtaatttgaaaatgacctggttgtgtttattctttggagggttaatatttaaattaacttgcattccacaaacaaacacaaaactaacagcagaaaggagcaaactagaagtgtgccaggccacagggaaattattgagattaaattttgcctaaaaaaaaatctacaaaatggatcttgtacatgcagatggttgagaattaactttagctgatcctagcacatatttaattccattggggattttgtgtttagggatagttcaaccttggctgagaatgtgacttttatgtattttacagcaaaactacttgctgctcataatggatgaaattggagaccaaagaggaagaaccttctgggttcctgtcagtctaaatcctgattttaaaagacattcacctgccatgctagtgttgtgtgcttctactggtaggaaaagctaataactaccctgacgagctcaacgagtggcccgaggactgtgatctcacagtttaccgtttttgcagagagcctcttttattttcgtgtcagattatctgtaaaatggacttctccctccagtgttgtaaaccataacaattctggcattcctctaattgtgtggggagagggagtatacccaacagatgcttgtcgagcaggagagactcttgctgcttttcattattttactactcatacacctaatccctgtcaataaggttggctgtttggggaaagaacacacatccctgcactataatactgatttatttgcagcttcttttcttcagaccgagttaactgaggagtctcacaaggcagtgagtcagccttgctatggactttgacagaagtatatctgaagggaagggagtgattgcagtattcagggtgctggggaacagcagacctggttcagcaaggggaggttaaggactatactcccacccctactcaagacatgaatgcctctcatagtgtgatccctggttgctttgttttcagtgaagattagcctcagtttctccgttaaaaaaaaaaaaaagtcagtctggaagattttatacggcctatgctttttaggccattgaaacaaaacactttttttttttttttttttttttttttttgcagaggtggtggtgggggaggggggatgccctttcagtgattagtgccctgctacatagttgtcttccagagctacaatgtcaaggagccctcctgtcctggggagagagggtgcgcagaatggaaattcagcttgctcaaagagtcataccaacagggctctagcagatttcatattttcttaataagaatgacaaaggggccagagtcctggaaagtaagatacacactgggcataagatggtgtttgccctcatgggaagagtgtggttttcccacaggagaatccagaataaccaaccaacatggccaagtttcccactgtgggcgggcagtgaggggcccctgagcagacaggatttcaacttcccacatgagccagggtgggtctggcaaaggtttaggagatgtctttcaagtgaatctgtttttctacatgttttctacctctggatgtatagagtcagcttcctgcatgacctgtttttgtgagacagaggacctgggaaacatgaggccatatttgaggcggttcattcttaccaaccgccagacctttgtttttagagaagtggaatcttcaccaaaggcccaagaagcctttgtggggtcagctgtgcttgagaattcttgaatctttgttactctttatcacctacctgagatgccacttttgcttgcttagctcaggtttggaatttgatttaagagggattcacatttctctgtttatcagaacttagcatcaattgtgtttctttgtagagatgtatgttacttaaaagataagggaaaggagcatgtgtttctgtagctcagaaaaccctaagaggaaggaccagataaagtggaaactttctacagcgacaattagagttatgttaaagaaacaagtgcaagtgagggcaggtggagcatagaaaactctcagcacagggactcaattaaaaatgcttttaaaatgtaattccaatcaatgtggatagtcttagaacattgcaagatgtgtgaaaacatgctttaaatgccagcaaccagtgaaaagggcacggttttagaaaccctgctataaattatgtgcctttggctttcaggaacgtggaggatacatcgctgaaatattcagaataaatatcagagagaattgtacagtcttttcattctgcaaggaatgaaatttttaaagagctagttgtgtttggcgtaagatcctgaaatttttttatagtgtcacaacatttgttttgggagatgtacaaatcaaatctgattataacaaatattataacaaaaatatccctctaaccaaacaatttctagaccccaaccagtggtccacttatttaaaacaatattgaatgtaacccaattccattaaggcaaaataatgtgagttagtcttggagtttttctttcatgagttccttaccttttggaattcatataggcaattggcagtgattccaaaaatgtttatttacctttggaactatatgattttaaaagtgtagtttatctttcaaattattttctgcatagttccattttacagtatctgtttttgtgggaagagactactccaaatgaaattctggtttctgattggtttcctccttgcctattttagtttcttatacttttatacctaaaaagtttttcttgcatttaacagagtaatttccccctaaaaactattgaagtagtagcataatttacatgttacttcttgtcaaccaccaaaaccacagggtacaacctgatcaaatacactaaatatgaaacaaaacacaggctcaaaatagagtagatggccattgctgcatgtgagtagtttttgccccgacccctggtcagttgattccagtcacgcctctccatgccttcctggggggtgattttgtagggccgttctgcttaatgtttcctgactcaacctgtccctgggttcagaacccagggatcttcttcctcctaattacccttgccctctttagtcctcccaggcttcaggcttccctccaagtggggatcccttcccagataaaagagttgagaagtggtttattgcttttctcaatgtttaaggaaaaccactagaaggctgcttagtatagagtgaaaaccatgtgctttgtagccgttgccatgggctctggagacagctctgcccctgctagctttatgaccttggacatgaataataattagcactgtgggtgcatatactctgtgctgtcatcagaacagcccattaaggtggagtttgctattatctccgtgttgcagatgaggaaagtgagacacagtgagactaagtaagttgcctctggttcacccagaacataagtgatgagctgactaggattcagttagtcttcagagcccatgctcattatctctattctagggtcagttttaaaccctcatctggatgtaccttacttgatgtaggcaaaatgcaaagattagagataggaggagccccagcaaggggcctgccacgtaggaaaatacttaagattataggagcttcctccttttcctgtcagatcagcaaaaatccaaagtatcgattttgtatatgtgtatttgtagtagtgctgttgtgatgtgttcttttcatgtgacttgtctgtcatatgtccttagagtgtaaacttgtcacgtggggcgggatgttttaatacttcacaatttttaggaccttcaaagtggcggttcaagaccatttcactttggagcattttggaatgtcatcacacagtcccgtgcgtgtttttgtgttaaatttctcatatccaacagatgtatcctcctcttctaccagttcagaatctgctatctgattaattaaaatgtatgcagatgaaaaatctgacaaagattttaacttgtagcctcatcagtttgctggaggttaataggaatattcttgcagtaacagaatcccccaatttggattttctagcttgatgtcatttttatttcatgaagaaaaaagggtagtttttgtttggttggttttttttataaccactaaccagatgtagtgataatactttataacttaagtgtctataatttttaaatctctttgtcctttctgcccttccctaattgatgaacaagcacttacacttgcaatgttttggctcttgtttcctatcagctgacttttggagatttacagcatggattaagtagggaccacttgcttatcctacttttctttgttttcctttccagtattccattccctttttccctgccatctcctcctgaccctccagaaaaggacatcttagtaccttagttgggtggcagtcacagaagaaaacttgattccagtgctatatcaaattgttggggcagcctaaggaattaagttgagggctgcatatcatagtgatttatactttaagaataccaaattggggcccatggctttacaaaggcattttcttatattaatttgtgaatctacatgaaaacaattaagacatggaaattaaatttcatttattcttcatttaaccaaccactttaaaacaaacataaaatcctgaaatcagtatatccttaaaatccagaatgtgtaggcattaactatttgtgactggtggcttaatcattttcaaggttcttctttgattcactaagcactgtcactgccactgtggttggtcattttgcttctcttttaaacacagtcctcagctttacattagggagctaaagtgaggtgagagataatgtcttagaatcttataccagttaagtatcccttatccgaaatgcttgggactagaagtgttttggattttggtttttttcagatttgggaatatttgcattatactcactggttgagcatccaaaatctgaaaaatctgaaattttaaatgcgcaatgaacatttcccttgagcgtcaggttggtgctccaaaagttttggactttggatttcagattttcaggtgtgggctgctcaacctgtactggccactttgaactgattagataacaggcatcacacaagatgcttgaagctagattgccctggtagagtgacaataagggataatgactttacactcgttttatactactgccatatttgatgatctgttaattgccagtcatgtttgtttagatattgtttagtcactgtgcctccccaaggcctttctggcaaagggcacaacaaatagagtaaataaattattgcttttgttactactgaaactattttggctcaatactctaaattaattgttttcatgtagattcacaaattaatataagaaaatgcctttatgaagccatgggccccaatttggtattcttaaagtataaatcactatgatatgcagccctcaacttaattccttaggctgccccaacaatttgatataacactggaatcaagttttcttctgtgactgccacccaactaaggtactaagatgtccttttctggagggtcaggaggagatggcagggaaaaagggaatggaatactggaaaggaaaacaaagaaaagtaggatatgcaagtggtattgtattttgttttttaaataaaatatgtggaaagagagaaaagccaaccagaaatatggtagaaagagcactggactagattcaggggaggcgtggccatcgtctagccttatctatgacgtctgttctctctgagcctcagtttcctctactgcataaccacttaggttcttctgatgtatgatggaccctatgatttattttacttgatatttaatagcagagctttattattttaaaaaatcctcaaattattagtttgagctaaatgttattctatatagatattctcagtgaaatgttggagctgcctcagacatgtaaatcaaagatgtgttcagtattttaatttctttcatgtgtttgaagatgcatttcccatgcatccatggttttagccatgaataaaacatagtattatggaaggtataatggtataaaatccagaaggatagatctgggctcaaatcgcagactagagatagatgacttagcaagttactcagttttccccaactagattctttttaatagtaacagtagcagcaataatatctatcttattgggttattaaaagattaaatgagacagtgtgtgtaattgcagagtgcctggcattttactcaattctcagtaaatgtatcatgtattcaaagtagtaattttggctaattcaaaaactatttgcatgctaaaagttgtagtgcctagtattaatttagttcgtggcctctgtatgattttctgtccttttgaagatgtatccatgacagaagtaataataagcagactgctagagcatcctgagcatgtgtcatgggccaggcattgggctgtgtgccttatgtatgttgtctcattctaagatttccttctctttttcttcaaaatgttaactctacttagttgaaagtattggactatgataacagcagagacaagatgccgtggtagaaacttttttaatttttttgaattggtaatcatgggtcctgataacttgttatagttgtttcttcattttttttttttttttgtaaaacaattctgcgttttgaattgtgtataatctgagatggattcaattttttttcttttgtggaaacaaacttaattgagcttatactattccagaagttttaagatgtggcatcttcacaactatcctgtttgtgaattttgtaggcttgtcattgttttcacatctataaaaatgtggtcaatttgtggatgctcttttacttatagaatcagaagtgggtggtgtaagagattctacacatttatcaaactatggaactttagaaggaagagtactgaaaggttagccttaccaggtacttctggcgtaatttctctcttctattttgaatgcttctttatgtataaagatgaatatcaaattcagtagcttgttaacaaagcaactagtgagtgatgtcattgctaaacaaattcagtacgctgttttatacgtatgcagtctctgtctcagttaaagaaattagtagatatgtgaactataaatatattaaatgaggcagaaaaaaatcatgcatagcctcatcaagcatctagatgcataggtccacagataatgatcttcatcaagttatgtacgtgaatctgcctgttcaataattagtaccattcttttgtcataatcctgactttataatgaacctaatgcagtaaggccaaaaaactttgtagatgttaatctatgtacattgtatttgagtaaatgtccttgtttatcagcagactttcattgcaagcttgaattggaaaccacatacagacctttccctaatcctaacttcatctttttttttaaatcagagaaaaataatgaatttattctatcaataattcttaaaatagcttggtaataactatcatttataaagattaccactgtatctgagaaaaaacaatacacagtcagtaattctcatcaaaatcacctgaacgttgctttaggtttcagtggcactctagtttaaggaagtactttattattgtttttcttttttttttattattattatactttaagttttagggtacatgtgcacaatgtgcaggtttgttacatatgtatacatgtgcctgttggtgtactgcatccattaactcgtcatttatcattaggtatatgtcctaatgctatccctcccccctgcccccaccctacaacagtccccggagtatgatgttccccttcctgtgtccatgtgttctcgttgttcaattcccatccatgagtgagaacatgcggtgtttggttttttctccttgtgatagtttgctgagaatgatgatttccagtttcatccatgtccctacaaaggacaggaactcatcattttttatggctgcatagtattccatgatgtatatgtgccacattttcttaatccagtctatcattgttggacatttgggttggttccaagtctttgctattgtgaatagtgccgcagtaaacatacgtgtgcatgtgtctttatagcagcatgatgtatagtcctttgggtatatacccagtaatgggatggctgggtcaaatggtatttctagttctagatccctgaggaatcgccacactgacttccacaatggttgaactagtttacagtcccaccaatagtgtaaaagtgttcctatttctccacctcctctccaacacctgttgtttcctgactttaatgatcgccattctaactggtgtgagatggtatctcattgtggttttgatttgcatttctctgatggccagtgatgatgagcattttttcatgtgttttttggctgcataaatgtcttcttttgagaagagtctgttcatatccttcgcccacttgttgatggggttgtttttttcttgtaaatttctttgagttcattgtagattctggatattagccctttgtcagatgagtaggttgagaaaattttctcccattttataggttgcctgttcactctgatggtagtttcttttgctgtgcagaagctctttagtttaattagatcccatttgtcaattttggcttctcttgccattgcttttggtgttttagacatgaaatccttgcccatgcctatgtcctgaatggtattgcctaggttttcttctagggtttttatggttttaggtctaacatgtaagtctttaatccatcttgaattaatttttgtgtaaggtgtaaggaagggatccagtttcagctttctacatatggctagccagttttcccagcaccatttattaaatagggaatcctttccccattgcttgtttttctcaggtttgtcaaagatcagatagatgtagatatgcggcattatttctgagggctctgttctgttccattgatctatatctctgttttggtaccagtaccatgctgttttggttactgtagccttgtagtatagtttgaagtcaggtagcgtgatgcctccggctttgttcttttggcttaggattgacttcgtgatgcaggctcttttttggttccatatgaactttaaagtagttttttccaattctttgaagaaagtcattggtagcttgatggggatggcattgaatctataaattaccttgggcagtatggccattttcatgatattgattcttcctacccatgagcatggaatgttcttccatttgtttgtatcctcttttatttcattgagcagtggtttgtagttctccttgaagaggtccttcacatcccttgtaagttggattcctaggtattttattccctttgaagcaattgtaatttgaagcaatgggagttcactcatgatttggctctctgtttgtctgttattggtgtataagaatgcttgtgatttttgcacattgattttgtatcctgagactttgctgaagttgcttatcagcttaaggagattttgggctgagacaatggagttttctagatatacaatcatgtcatctgcaaacagggaggatttgacttcctcttttcctaattgaaaaccctttatttccttctcctgcctgattgccatggccagaacttccaacactatgttgactaggagtggtgagagagggcatccctgtcttgtgccagttttcaaagggaatgcttccagtttttgtccattcagtatgatattggctgtgggtttgtcatagatagcttttattattttgagatacatcccatcaatacctaatttgttgagagtttttagcatgaagcgttgttgaattttgtcaaaggccttttctgcatctattgagataatcatgtggtttttgtctgtggttttgtttatatgctggattacatttattgatttgcgtttgttgaaccagccttgcatcccagggatgaagcccacttgatcatggtggataagctttttgatgtgctgctggattcgttttgccagtattttattgaggatttttgcatcaatgttcatcaaggatattggtctaaaattctctgtttcggttgtgtctcttactagctgcaggacctcagacaagtcccttcacttgtatttttattaatacttagtatttaacaccaaaatatttggactaggagttctctaagtctgtgaatacatccaaaaattaagatttactctgggggaaattatgtactgatgaagtagaatgagtcttggatatacttaatctgctgtggttaaaggaagtcactatcagccaactcagtaacgttattttgttttttatgtttagatgtacaaataaaaatagctgttatatatttgttagattttgatgaagagcttgcttcatatggtaaagagctcttcacatacattgttgtagcagaagcgaaggttcattggatataggctctttccttatagagtgacagcatacatgcctggtaaagttgaaagatctctagctttcatgttactgggtgttaggacatttctctcaggaattgaagatcgaatgtccacattaaggacattctagacattctaagtccttattctaaggatacactgacttttctggctacatggatacagatctgttcagtgattctgtggataactttttaagaaaaatatgctacatattttccaaggattccttaactacttcctggaggcagggagggaaggagggagagaaagagagggagggaggagggaggaagagagggagagagggagacagagagagagagagagagagtgtgtgcatgtgtgtgtgtgtgtgtgtgtgtgtgtgtgtatgtgtgtgtgtgtgtaatttggtatataatatagttatatataatttgatatttttttaatgactcttggatagcataagaaaatgttaccaaaagagtgaaatcttgattagtttgaacttacctcactggtgtctcatgtaacctgttattgttaagatgtggtgccataaagagggccactcagattcagcacattggcagttggttggagtttggatctggaagcatcctattttgtggttttcttaagttaaaactttattttaaaagagaaaataaatatacaggctctttttaagatcaggcaggcccacagtcttttatccactattctgaaatccagaaagctctgaaaactgaaaggttttttttgcatctcattcataacaaaactgaacctggcttgaagtgatgtaaaagtgtattaatgtttgattatagactgttattccagcccctgttagagtatatgcatcatattgcctttaggaaattccccagatactgaattctaaagcacatctggccctcaaggatttcctgacatgccttttccaagtccagccttggaacttgtgtgcttaccttatctctaactctcattgaaaagaggcaaagcggtcaaaaaccttgtccttttcagctttgagccttcctgcattcctgtgaggggcctgcgttgtagtagtcgtttgtcataaatcagtgaagggagggaggaatgttcaggcaggtgttccaaaccagtcagccagcaatttcctgtccagtgtcctaggcttaaattaagccatgaaactcagttgcctgatgaaactgaagttatcaagtaacaatttaggacctttccccggcatttaaaatcatgagaatgaaaatgctcaagcatctcagggtggtaaaatgactcttggttggggttgcagatcacactatgcccacagccattatctcacctcctggatcctattgagagcatcctaagaagagaatgccagaaacttgttatgatcgttgtggtgacagtcttcaggttataaaaaaatgtaggaatacactacattctcctgctcttacatagacaaagggatgagtaaactatggcccacaggccaaatctacttcccagtttgtttttctgtggcctgtaagggaaaaatagtttttacatctttgacagggcataaacaagtaaacaaagaaaaaaatgtacaagaccttatgtgggttgcagagcctaaaatgattgttgtcaagctgtcaaacactttacacaaaaagatttgccgacctttgatgtagaccatcagtttaactcccagccttactgctcctatttttaagattgattctttccttctccattcctattctcctttgtcttcaagagttggctgactctgtggtcattcagggctcatagttacttttttgcatgaaatgagaaccctaaaagatggtttatgtcccctttttgaaatgtacacaggaagaaactcttaggtagaattaaattgagcgtaaacatgaagtttaaacttattttgatattcaggtgtggagagaaccagttaaagagtttacatggtacctatgccaattttacaaaggcaccattactctggtcccttaatcaacaatgatccatgtctaaattatgtaattctggaatatcagtataatttaggaatcatactgtgagccattctatttttttctaaattatgtaagttacatcaacatacaactttttatatcttgccttttaatccatgaactgataaggtgtggttaatctcactgatcttgaaatattctccgtattttgtattaggagattagtaaaaatcagttgagacctagagtcagaaatattacattctaatactagcttgactcctctagctttgtgaccttaagcagtcacctaatctcacaggagttctgtttgctcattaacatggcagtaataatactatccaaataaagttttgtggagggcatgtacaatgatgaaacgtgcagaaatggtattggtgaagctgtaatgaacttatgacgacagtttatcatttatacatatactgactcatttcttaagatatcacaaaccataattccatagaaagcctgagaaccaaaaggaatgaggttgctttttaatttacattattttcatctatttctaatatggatgtcttaaaaatgagaaggagtatttattcctataatgcatatcctcaattaaatggttatattagttaacaattactacctaagaacttcctctaaaccatactggtatgaaatcgaaagcatttgctacatctgattggtctctgtgttggctgcggtggaagcttttctctctaggctgggcttgaatttgcttatatgtctgcagtcagctgggtggtctagaacagggatccccaaaccccaggccatagaccggtactgacctgtgtcctgttagaacccaggctgcacagcaggaggtgagtggcggctgagtgagcattaccacctgagctccacctcctgtcacatcagcagtggcattagattctcataggcatgcatactctattgtgaactgtgcaatgcagggatctattgtgaactgtgcaatgcagggatctaggttgtacacttcttatgagaatcttaactattgcctgatgatctgaagtggaacagtttcatcccaaaaccaaaccactaccgccaccccacctccgtccatggaaaaattgtcttccatgaagccattccttggtgccaaaaagattggggactgctggtctagaacgtcttcagctcaactgaccaggctctccctcatgtatctatggtatccctctagcaggctagccaaggcttgttcttttggcactagtccagagtctaggagagcctctctttgcatcatgtgtgctactgtgccattggccaaagcaagtcatatggctgagtctagcatcagtgacagagccctaccaaatgtggatacagggaggtgtgaaaaattgcagccaatattgcagtcagtctaacacagtagttttagaggtaaaggaaagtctgcccaagtggtgactggcttgtagcctggcacatgcgtcatggttgggcccgtgtgcatgcgaacggcttggtaatttcagtgcttcccttctcatttctcatagctgcactagaaccgtggcagccttaccatctgactgcttcatgagaaatagcccacgcccaaatacacacctcttgtgtttgaaataacacaaagagtattgtttccaagacgactttgatgaaatgtcagctttccctgggttctaaacccatataagaagcattgttaccctcattcctgctgggtaatttgtatactgcaatagtttgtttgaaaacatgcccgttgttctttaaaatatgcttaatgctagattagaacagatttttttttctgtttatgcaagctcatttctaaagcatttaaaataaagagcttgggcatgtgtggtatttaaaaacccctcacatgatgtttttaaaacagatcaatttcagcattaaaatgttaggaattcagccaaggaaaattcagcttggattgtatagctgtaatgataatgtattataaccatcttctttgaaagtgattgtagtaacagaattgaacctggtgaattatataatttaacagtgttcaccagaatactactctagggggattattcaagcctttcctaaagcaaaacaaaacatggattttattatcacaagatagtcatcacaaaatatctaaagataactcatttggattgaacagaaggtcatatgtctgaacatcacttatcccacttaactacttggcaggatattagtatgtaagagtgcatgatttttgttttttagctactttgtcttgtattaaaaatgtcttgagtttgcttattacttacccagaaggtattttcacgtcagaagtaacttcataattgagacattagtgattcacaaattgactcccaagtacagatggccctctatattcctgggttccacatcctcagcttcaactaaccacagattgaaagtatttggaaaaaaaatacaataaaaagttcaaataaaaatacagcatgtacattatattataaataatagagatgatttagttataaagaggtataagtaatactataaataggcattataaactagagatgatttaaaatatacaggaggatgtgtctaggttatatgcagatactatatcattttatatcagggacttgtgtgccctctgattttggtatctgcaggggagagggaggagtgtcctggaaccaaacgcccatggatacctaaggatgactgtaatttagaaagtttatatatcagtcatattatttaggcatattaatctttttaaaacttttttaaaagctttgaaccaacaaccagtttctaaacattatcaaaacatctgtaatgttggtttctcttcggggttgaattgtgtctcaaaaagatgtaataaaattctgatccccggtacctgtgactgtgactttatttagaaatagggtcttggcagatgtcatcgagttaagatgaggtcatccgggaatcaagttggccctgcatccagtgactcatgtccttataaggagagagaggtttgacgatacagaggaggcacagaaaggaaggccatgagaaagcaaagaggaaagactggagttgtgctgccacaaaccgaagaatgccaaggattgccagcaaccaccagaagctggaagaggcaaagaagcattcttccctggagcctttggagggagcatggtcctgccaatgccttgttttcagacttgcagactccagaaccgcaagaaataaatgtctgttgctttaagccacctagtttgtggtggtttgttgtggcagccccaggaaactaataatggctcccaagagcgaagtttatctgtcagttgtgtttcatcatcagtgaagtacttgctgtatgatgctaaatccagtgagcatctacgtttaataagccccagaactgtacatgttaaaagcttttaaaattttgtcatttggtatcatctggtcaggtgcagacactgcacttaggctctggggatactgtggtgaaaaccctgaataaatttctgcccacatgcagctcacatttcactgggaagacacacagtaattatagattagcaataatgacagtattgcctcagtttgcgtttatgtagcctacattcttcttctcccccgaatcgtaattgcccttggatccagccgtgggtgatgcaacgagctcaccatgctcctcacttgctcatgggcttgggttagtgttgccatggccacgtacaagttatacagaagcgcaattcacatgaatctacgatgttctggtgtttcctggagttgtagcatctacatcctgtgtggtcatatgtggtggccccatgggtgccagattttcttccttgtctctcccttcaaaaatatctctcaagtggagacctcagagcttttccttctctaatcttttcagaaaacaaaacaaaataaaattttgtaacattcttttttcctcgtctttcatttttatagaacttaagtagtttttacttcttacatgtttgatagagttctcagcctacatcaaatatatttgaatccagaattgtcaaccctaatgaagcaagtcccttgtcattccttggcctcttccttgcccttccttggcctcttccttgccctcttttcttgatgttgccttactgctctttgtacaggctggtttcttttcacaatacacaagtgtaatttgctgagcctcctataagaggcagtccttaaaatcagaggcctgtcttcaactatcagccctttgtgaccttgcatgagttacttcgtcccctaggattcaagtttcctcctgttcaaagtgaagaggttgaggtagacaagtgcttctcaaacttttaatgagcgttaaaagcacacgattcagtaggtctggcagtgagactgggattctgcatttctaacaagccctcaggagatgctgttggacagtggaccacacttttttgagtagcaagaggctagatgatttctctggtccctcccacctaaagatgagaacttccttcccttgttccacgttgagaaggcccaccttgctggtcttcacattttaatagtctcaccatctctgcacactgtctaccaaaggaaaggtcacagtatacttcgtgctgtcctatagtgcttataaggacctgccatctgcagttcttattttatagcttggccttctccccttcaacccccgaaagactgaaaacccactatctaatgcctaattagaattagccttcaggttacatagtttttgtgactgtttcccttggttatctgccattccttcatttcacagtaatggtagatttataacagtcctcataactgattaaatgtctcaattcttttgctttatgtggcgttcttgggcacttaattatactacattaaatggtgtcttgttgctgtcagtgcagttggattgcagtatagatagcatctttggatattttttaatatgttcctatcatacactttaagcttgtaaatagaagtgctgagcatgcataaatgtgttttaagaaattatttctttattactgtttagctgaactgatggtgacactaaacactgaggctttgatgtttatacgatattcttccccactaattaactgcactaatgaagttaattgtggggaagaatgccgtataaaacatcaaagcctcgatgtttaatcacaacttaaaaagaagttttatactcttcaattgccaaatacattccaattagctgaaggaaggtcaaaaattctgttttcttccatctcatcttcagagcttttctggttgaccattggttacttgagctgcctgagtgttaatctagacaagctgacagtggcatgtggaggacaacatatcttcccccaagctataagccagcataactgagagactcagtttctgcaaaaggcagtgatgacctcttctgtaatgtgttgatgaaaaatgaatgaactcacagagtaatgcatttctctaccctctaattttattattagcttgacccactactccattttcctatatgtttccatatgttgctcttataagccacttctctaatttctgataggcatatttccttgatgaattcagactgcaaaaccaaggaaatgtgtatgtgtgtgtgtgggtatgtttaaaggcatagggcgtatgtaagtggaggctttgcaaagttgataagaattcttaaatgaccagtagtagaacaagaactccttctcaggtcaatttccctgtggtgtgtgttacatcaatttttattgttgttttttttttttcttaatcaggcagggtttacaatagcaataatgtaattcaaataagcaattattgtaattgaccttggcgatgagtatccttggcttttaccacagtttgcttaatacctgaggatgggcaattatctcataatgcccactttattgagattattgttttaattatggcactcaaaatacatcactttgtcagcattgtagagtcaagcatggaagcactgcattcagtattcagaagtgcgtaaagagcatcttgcctcatcttatgacatggttatgattgcgttttttctctctcccaactgtggttttgaaatgtagttcatcctgacgtgactggcttatagggagagaaagtctgggatttgttgctgagctaattgtgctctcagaaaggatgaaggtgacttgtgctgataggtaagcaggtctagttgattaggagtggtaattgatagcaatcacagtggcttgttgattatctgaatatgccttaggtcagaggttgtcaactttagaatcacctgggagcttttaagattgcctgtatccaggccacttacttaagcctaccctctctggacagcgtctgatttaattgttctggggtgggttccagatggggctttttgaaagctccacaggtgattcttatcccctgacagaccttagaaccactgcccggtcctttgaattatttactccttgctgatttgtctcattccaaccatgaccccatcccagattttaagactccttttgggggtccttgttgctctataccttactcttcctctctttctttccagacttagcctaagcctagccacctcacatgcacatgcttgaaatagcctcagtgcagatttgggtcctagtaatgctaattcttcccaagcagttccaggtctacccctcccataggaagtgtcagtgggtaaatttcacctcttcataaacgtgaagtgtcatttcttactaatgcctcattatgctcttacaattcagttttctcttggtcacataaatatggcttaacctttatctaagttttttgagtaaggatcagaatttattctttaacatctgtcttaagtactgggtaccactttgtggaaatttaattctggttgattagatcagtagttatgaagttcctagttgtttctcaccttctttgataaacctggaggatactgttcacacgcatcttgcagtcccttgattccctaaggataggaatattcttttaggttacctaagactcctgcttctttttttttttcttttttcaaatttttagacgggatctcactctcactcaggctggagtgcagtggcaccatctctgctcactgcagcctcccaggctcgagatcttcccactttaaccttcccacaaggtagttgggactataggaatgtgccaccactcctggcttttttttttttttttttttttttttttgtattttctgtagagacagggtttcgccatgctgcccagtctggtctcgaactcttggactcaagcagtctgcctgcctcagcctcccgaagcaatgagattacaggcatgagccaccatgcctggtgattcctgccatttttacactaagaacctgtatcttattgcaaatgcatgaagatggcatcattatattgacaaacttgattccattctaattttgtattcacataggaacacacatttgtgtgaagtgagtcactcatttatatcctaatgtctcagattcatcctcttcccccttccccagtagccctccagtctaaaccaccagcatttccctctggaccacagcaacagctccttactggccccccatttctcctccaaggctctgttacctgccagatccactttagcccacaccaacagcatgagtaaagtaggggcaccaaaagtggtaaaaactcagctttgatgatctgattcagaattttgaaaccagaattctactatttaatgttagcatacacagaaggtttatattgtacacttagtgttgtttttaattgcaaaggatggaggtaggcagtgtaatcttttctgttcttatgggctttaaaaattcttactgtgattcgagcctcctctctgaatgatttttaggatatgtgtgtcatctcaacagtccccttcagtggcccttagaataaaacacacacctcaccgtgtgctgggcctgcacactgtggaccccctttctcccagcatcacccctctgtgctctcccacctgctccctccacgtcagcacccagtcctcctgtgtgctccagtgccattgccagctttccgcttcttcagagctatgcatgtgttattccctctttctagaacagtcttctggctgtcaggaggtttggctccagcttttgcttcaggtgtcagccagaatgtcatctttttgcagaagcgtttcctgaccacctggctgctagttattctcagtctcagcatcttatgttctttgtaacacattgccattcgcatttattttattttttattaatgttattagcagcttgttttacttgatttttaatgtcccttaactagaaccagtgctctgtgagaacaaggtccccattcgccctcttaattgtatttctagtgccttagggcccagcagaatgcctggcaaatagtggggactcaatataataaccctcctgctttgttattgataagggattatgtgtctgcatgcccccctcccccatgttagttttgaggccccactcactttagagcactttagaattatttgtcaaattccagtgaagttgaggatgcaaacctagtcttcacttagcattgtaactcaaggttgccctagaaggcacatttgacatgaattctgcaagttggaggaagagcgcgacttctgaagagaacaccaatccaggagggcaggaagatacccagactttggaatgtgctgtctgaaattttgactgtggagaagtggagtggcttttccccagggtcctgaggcttgaaaaagtgtccattaccctctttcaaaggcttagaggagacattcacagcagctctccaggcctcctgctacccagattggtttgctggcagagacttggccattgccttttaggacagatcccagaaacaatcatgaaaggaagggcggtatgcctccacttcatgtagttatctcgtttaattgtcatgactatcttagtttgttcggggtgctatgataaactaccataaactgggtagcttaagtagaaatttatttctcacagttctgggggctgggaagtctaaaaacaaggtgcctctattagatgcttgatgagtgcctgattcatagatgatgccttcttgctgtccttacatggtgaaaggggcagaggagcttctctaggcctattttataagggtgctaatcttatttctgaggctctaccctcctgacccaatcacttcttaaaggcacagcctccaaataccatcacctcaggggttaggtttcaccatatgacttttgatgggacacagacattcagactatagcagtgacaatcctgtaggcgaaatatccttatctccgttttataggtatgacaaagccccaaggggttaacttgctaggagtcacacagttgataaatgttggagctgaggattgaaacctcatgagtgcatgtgtattcccttcccttccctttagactctactctctaatctcagtgctggctataaagctggtgcctttttcactgttgtgtttccagtgtctaaaacattaccaacacagaatagctattcaacttatgtcacgggattcttctggtattacaacgtgaatctctgcttgtgaagtcgttgttattcttcagatagaggaataaagactcatttttccatctgcctgctagcattgaaaacccttaggcagaatctcccccacccaacctctgtggtctagctggccctgtcaagcctgctaataacctctccagtctactctctattctcagtggaggaaggtcagtgggtatctgttttagaaatgttgtcagtggctcaaatgtctgtgacatgccatttgtttaatcccatgctcctggatacttgcttgtacgcattaggttgtgggatcttctgcgtttcaattactataccctggaagtttataaaccataagacttaccagatagcagactgttggctgtgttagcagagagctgtcctgcggtgggacatgcatgcacacatgccacacgtgtgcatgcatggaaagagagagacaaactcaaccacaaaagttgtacctctgctttgagttattttaatcttccttcatttgttcagcaaacacttatgaattgtccttgcattaaaaagtgcatcatgtccttcgaaccatatttagtattaaatagcaaaagcgcatcactgagctagcattctttttaataaaatagtgattgatcaaatggcattcacctcatttctctgtgtggtgagtgagagtattttcttgcagtccattttcagcatgctgctattactgcaccacttagcttgatgccaaattgcagttggctccattcatttctgtttactgagtagcgctgtagtgattaaatgtcactgggtacaccaagtatacaaaagtaattaacctaaaaggacatgttagaataagggtcaacaacctctttagcccacagtgccaccagcaagacagagtattgacagaggtattgctggcagggcaagggcggaggggggagtgtggagaacggaaaagagagaagcgaatggaaggagaaagagggagagggaaaggtcagagaaacaggagcgatagaccaggactcacaattgtctgaaatggcaagtagaatggagctaagatatttttcatcagtcctttataatttagttctctgacctgtgatcttttgctgggggagggtgagagattagatcataactggacttacctttcaacattttagcactggttagtggagtgctcttgtctggttagaccagagtaattttggcacatgcttggtgaatcaacctgttcttccagtgttttttgtttcctcaaagtctcctgcatcttagatcttgttgtcatgtgaaagctcgaaatcgtttctgtagaatgaactgaaattgtatctcttaagtatctatgtctcatttattttcattcctcagcatactgaagttactatcagtcacaactgatactaataatgctttatgttgctttacataataaaaatttacgtaaagcaccaggtagtcatctatgacttaaatatcaaccaatgtaaacatcttccttaaaaaacaagtattatatctgtctgccttatatttggctttttctttcatcatctgtgtgtggtgacttactaaccagaaaaaaaaaaaagcaggggggaggactaaggatgtttttccttttaccacatacctccttgggggataaacatttcaaggagctccccagggtcactattctctaaatgagcagcacagaaaaactgctgatgcgtgcattcttccctgggtctgtcaggcaggattcctttaaatcctgtcttttcagtggtcagacttaagtaagatttgtttccctgtggtcacagacagctgaggagtgtgtgatgagagacaaggaaagggataacctgttgaaaactttccctcttataggaaagattaatttctattacaatttttaaaaaggtggccttcatacatttatccaacaatgaatattcattgcatgcccacccagtggccaggactgggcactgaccttgggggaggggcctgcatccttgattggtgaggagagcagcagtgaaaaggcaccagctttaactgtcttttcaacatagttctgaaaattatcttgtcaccctattactttcaaaattactatttttgaaggctgcctccctcctttggtgtgcctacaaatgcatatctcacacacacacacacacacacacaccactgttcttgtattacaggcattatattaagcactgaggatgcaaagaaataagacacaatagtgcatgacctttaggaatgcataatctcctatcttaatataatgaacataatatggtaacatgaagcatacatgagcagaaccaagttttgtgcccattcatttgttcagcagctgtcaattaaaacaccgaagtactggattttcgtggtgatccaaacgggcgtggtccttgccttcatggagcttctagtcaagtagatgagataaataatcaaaagagtagccacagccacagtgctgggaaggaagcacacaagggagtgtgttagagatcggctggagggagctccttggatagcattacagataagacctttctgaagatgtgacatttaagctgaaacataaaagatgaaaagatgctagccactcaggctgggaaagagagttcttggcagaagtctgcacagaggctctgaaggatgaaaacgtttgggttgtctgatgctctgagaaggaaattttcagatcagattggagaaggtgggcaggagctagatgacacctgctacttatatcaagtgtgagatgtttgtcttattgggtgttgatttctgttgtgactctgagaacttttagacctgtgttgtctgacatggtaaccacaagccacatgtggcttttcagcagcagcaatgtggccagtccaaattgaggtgtactgttgtcagtataaaatgcacatcagattttgaacagttagtactaaaaaaaatgtaaaatgtcacataattttcatattaatatgtgtattgacatggtattttttgaagtattggattaaatagatgaccacagttaattttactgttatacatttaaaaaaatctgactatccgaaaagtgtaaaatacataggtggttcacattatatttctgtctgtcagcgccattctaaagaataactttaatattttaatgaaggcccttaagaccaatcagttaagcgataattgaaaactgtttagcccttttgtggtgatatgaagaagaccagagttcctgattagcgaccttaaaacttattaggcagccttcctttaaattgatatattgtcatttctttctttgttcctgttgtattaccctcagacattgtatagagtatatttgcatacagaatacataagaatatatatgagaatctgtggagttaacactctttggaaaaaaaagtttagcctttcaaatagattaaagcagtttactggaaaaaaaaaatagcaacatgaaaagactttcttttctaataaatgttaatagttactaaaatgaagattctggtccattaagatacagcttgccaagtcctaaagcttagtaacttatttctctgagctgttaccctacttcagctttgtcaaagcagctgttatgcttgtgttgatattttcattcaaaaacagagcacagtgcagggataggtataaagccagtgcaccttccgtgaacatccaggaaagagatttttgccaaccctctccacttttgtttttagggcagtcaaactcatgtaccacatgagatttgccagtgagacttagtaacattggttataaagcagtaggtgaatgagtggtttatgatatgttttacaggtcatatactgaaaaaaataattccagaagaaagtggccagtgcatgtaactgtaatttacagagttagcatacaagatttatagaatttgtattaaggagagcgagaattcttgctggagaacaaatggacacagaaatgttagactttgcaaactttgaggaggtccattggattgaaaagtgcgaaatgactttggggtgataggtagtttaaacgatgaacacaatacaaagttgtatgcagttggcaatttttattacaatttctgttagactgttaataccatgccatctctaatgatcaggagagggattacttgattaattcagcttgtactttggattcttctctccatcagtggtgaggggttgtacttgttccaactcattcatctactttcttccttgtgtggcccaacacttgcaccacatgcagactagctttcaagagagggcaactaagctccctacataagaatcaaccctgtgtctttggcatcaaagcatcatgtcccagcagctcagtttgtcagctaaagtaactgtgttcaatgaaatttctggggtggagccaatagctttattccaggaagaggaagcaacagtgaagaaacccccgagaggacattaagataatgttctaatttaaaatcaattttattgatatcttataaattattagagcgttttatactgaccaagcaatacataatgctgaggccatgaaaacagaacatgaatgaattaatattgaagtgctgtattttctactacacatgaagaaaaaaatatgtaatacttttgtatcctaagtattttgactcaaggagccctactgaaaaacaaggtgtatatttcattcttcaaggtgtgtattaatattttattcaagacatttcatgtgtttctgtacttagtgggttaaatacttgttgaatgagtccataagcagacaaaaaatatgcggttgtttccacatttgccaaaagggaatagctgtctatgggggcttactagtactagatgctaggttgaattcttctttatccttatggcaacttacaaggaagtgctgctaacaccctcgtcttacctactggagaaatggaagcttaaagaggttcatgaattttcccaaggtcacatagcaagtgttacagcctggtcttgaacccaaggctgtctgacttttatacctgtagcataaccattgtagacactgcctctcttctgttattcttctgactgttggttcctctggtttgataatattttgattacctgcaaaagaaatttaccttgatccaggtttctcttaccagtagagaagcagagacaaaaacaatagaacattttaaagaatatattgttcatgaaatgttacagaaggtgaaacatttgttaagaatagattcattactttatatggagattatattaaatcttcttttaacaagggcagggctttagaaagtcccagtcatttttgaaggtgagttttgatttatgttaatttgaaaaaagcaagttctgtgagagttttatacagattgtgcttttaatgacttccttaatcaagcaggttataaaaaagaaaaacctcttactgtgatgagcagtaaactgacaccagtgactggctcagtcagagctctactatattcaagttttttaccaccagcatgctataaattttaagttcatttacataaatttacatgtgttatgtgttagtatgtgagacttgtgcattttgaccaagtaattttcattttaaaggttttatatttacttttttccaattgaggattatttcttatatatatatacatatatatatatatatgtatatcctggtggtttccctgtaaatgagataataatatgttaaaatgttttatcagttataaagagctcaatgaatgggaaaataaacattttgtgtaattctgtacaataaaatccaagcagaactagctgggttatggtacaacagtagtttgatgtacgtaggtttattcaggatattactttccaaacttactcaaagtagttccaaaaaaacagaaatacagtgctttgtggtctggtgaacatgatcaactctttggatgattcatgactatagagtcaccagtgttcatttttatttttgacatgggtcttttgcttttctaaggggttgcagaggaaaatatgattgaggactttggttatggcatcagtaaaggatctacaggggccttcttcagctttctgtcttctgtgcctccacccctgtccccatcaccaaaaacaaactcaacttgaatcgtccctgactctgattaatgtttgagaattcctatagtgactgaactatagttaagagtaactataatttatcgtctaaacttggccatttttgagagtgaagggaagtctggacaacaggtgtagaaagggcaaaccaggacttgcaattacccttgacatattttagtggtaccttctgactcctcattatcccatttatctgtttgaaaactgatttacccttttgtaccgtgtggatacgatttttgaaggccatagctgatgagcaaacaagccataacgaatgagttttaggctgcttgatcatggtttccatgcgacctttagcatgttctttctggttgttatcgtctatgggcagggaagtctaagcactgcacctgtgtgaatggaaagcaaaattggcatggtgtgcatttgaaatcaaattagaaagtccattgtggagatggtatttgcagtcttgcctctgtgcagtattgaaccaaaaccttatcgtgattgttgaaaggagaaaagttttggtgaatagtagcatattaaaaccctataattatggggcatcagaatatctatgctgggggaagtcctacacaaatgtctagaaaagacctaacataaggtttaaaatagaagatccacactaggtcaccatcccaatctctaaagtaagtagaatcaactggagtccagtatacagtgataggactaagttgcactgttgaggggctaggctatgtgcctgggactgcgcgttgtactttatgtggattatttttcttggtcttcaaagcagcccgtggggctgagaatggtgtgttgttaccccagactaaagagaggctgagactaagcaacatcccttacggctattaagtgaagactctagactcacaccaggcagtctgactccagagagatgctcttgcctgctattaaaatctgtgctccctgttattaaaattagctaattataacaacagcatcttcttttggagggggaagttactttatagaagtctttctcatacattgtcatctttgatcttgaggtggcagaggagtaaaggtggaggggtggggccttccctttcaagttgctggaggtgtcagttttccatctgacttggtcaacagccctagtaaagtctgggatggtctttaatctaggaactagaatcttctcatagtgaaattagaacctgattatagctttttaaagcttaccttttgctaccaaagcaattggggtttccatgtaataagtcttttaatcctttagtatttttttcttggtttctccttgttttcctgctctttttcttaaacagatctaccctgttctttttaaatatcccagcataagtgtttacttttaaaatccagagctttactaaacattcacattcagggtattttgctttctctggatcagccattgcttgtgaccgtgactctccaatcataacagatttgctgagatacacacacacatacacacacacacgcacactcaaactgtagtgagaaagacttgtgtttaatccttctaaatttgtagatttatagggtcacaatgcagcttcagtaagtttcttatgtagtaaacttgagaaatatctaaattgagcttttaaaataataatagagaaataaaaaataataaaataaaaagcttttctagtaaaagcatgactttatcggtatttatttaattcctcttattcacatgcctagcaaagatccaagtggcattcctgtggcagaatggtggacttacaagattcatgatgagagtctgtgccaagtccaatttgattccagagtaattatgttattagaacattgctgattgccccagtgcccactgtgcagcttaacctttaaatgctagtgataattaactactttatcattctaccaagaaactccaacatgtaactctgttctacagtcaacttcaaaaatacaacgctgcctgcaaaaccggaaacagctagcttaagaaaaatataaagtatttggttgtacatatgagccaataaatgaacataaaatctaaatctaaataggcattaccttttagtatttttaagaaattgttttgtttagaaatttttcctcttaaacaatgtggaaataactttcaatagaatatagcagaatcagagaattgttaataaaagatatatatactccatttttcttctttttgtaaaatatgaaattagccagatttagtgcatctaaaggtaagtaaaggagcaaaggtgaggaaggggctgaattgccatattaccgattccaagggcaccacaacacaaatcttactctagtgaatggtctcccatggaattgttcatcctagtgatgctcagaaaaggaatgtatcataagagatttggagtgagattgaggcgtgcagaggggatgttcagccatttgtgttgagaaatatttctgggcagttcccttctgctcatgatgctaggtgccccaccctcagggaacccacagcctaaagtgggaagtggccttgtaaacacagcaataaatttgttgtgagtgctttactcattggaggaacaaaatgttaagggaacaaagaggaatgaatgattaattctgcctgacagcatctgaggaagctttgaaaggtgacattagagctgattcttaaggatagtgggggatttcaaaagatagatcttgagaaaatagtcattgccataagccaggaaaaaaggctacaggtgcaacgaaaatacacagagcccaggggaacactggcttatagtgctgatgtaggatacaaggccaggactctggattggggtgtggagtgaggactttggaaaacagccatactcagaaatttggaatttttttccccctgtgaacagtaggaaactgtccttttaaaagaggagttaaaacaggctgaacctctctttgggaagtatgaattccagaagtgaggtggatagactggagaggggaaaactagaaacgggattgaggcatgaagtatggtagatagtaacccacagatgatgattgcatgcatggtttcagtggtcatgaaaacctactgagtgcattgggttgtgtgaaagcaaagcagaagtgttgacccaagtctcatggcttgggagtgaggtttggaactcagcagagatacacaaaagtcaagaagtagtccactttaaaaaatcgtttggctcgtaatgttttgtgtcaatcttcagccttactgaataatgcctgcagtcttttctgccactaagtttaaggctgaacgtttgataggtctagggctagagtattcatataaaacctcaagaggggctggcacagcagggacggatttagaggtccccagcccgcccagtgggcacccactcactggtcccatctctctcccccaccaaactcccacctgcacatctttggagcttgtaataaagagttgccatcaccacaggtatgaagaaagaccatcaatcttcttaacaatgtgctttggaagttcagaaatgccacaaaagagattgtgacattaaggctcagtggaaataaaatggaacatagacccaaaagttctgggtaacacactttctctcatagttaattaaaagggcctcgtaaatgttgtatgtttttataaacatcagttattaccaacagactaagataaagcaaaaaaaaaaacccgttcaaagagttagtcttatatgaaataaatttataaatgaggaagagctttcctgaccagttttctgaattgatttgcatgccagacagagacgttccagtggtgattgttcttcctataactttttttccatagagattttcagatattctttctactactctccaagatcagccctttgttaccctgggttagggtcattcacacttgggagccctgccctggtgccctgccaagggactgtgttactcaggtttttgccattcaccactcagcagcatagcgcagccctcagtccagctcccgctctcccacctcacctgcatttagatcttttctttggtctgtctgaagcttagtcactaggcagttgttaagattgttccagttttcattggcacttttttcacttcttcatccatgattttaagctctcatattatctaaatgtgcccaataaccacctgaccttcatggcagatagagtcattctctgcttcaggtcttgtcacccacgtctcttgtgtgtataggagacttctccagttgagagctccttgaaagcagaggtgaagcatacaggctgagcctaagtgtggtcccaagaggcatggagcatctttctccattccctggccccagtggcattcctaggtttccagacattgaaaggtgtgggttcatgaaaactataggagtgagaaaggaataatacgcatttctgcaggtggtgtttttcctgccactctgtatcttccaggccctaacatatggcgctgagcaaaacttcataaatatgacctatatgtcacatgactgccatctttggttgctcaaatcccccaaaattactttcccccctttttttttcattgacttactaattacctcttaaaagctctactttatagtttttctatagaagcttgaaatgctggcttcccattagccagcaaactttaaaaacaaaacaaaacaaacaaacaaaaaaacctggctttttctccttcccttttttctcatatatgcttcctttcccaactttctttcttttttttgagacagagtttcactctgtcgcccaggctggaatgcagtggcgccatcttggctcactgcagcatctgcctcccgggttcaagcagttctcctgcctcagcctcctgagtagctgggactgcaggcacgccaccatgcccagctaatttgttttgtctttttagtggagatggggtttcaccatgttggccaggatggtctcgacctcctgaccttgtgatctgcccgccttggcttcccaaagtactgggattacaggtgtgaatcaccatgcccagcccctttcccaagtttctaaaggcacttcaacagtacaatatatccgtaaaaccaaacccattctgttttgagtttacactaattcctgccaccctttttatttcctctcctccctctgtcccatctctctgcctcttctcgttttttctttctttcccattatctttcccccttgtcttttgctacttgtctttccctttatatccctgttttcttcctttcgtctcctccgctttctcctatctcctcttaacagctttgcaagtatatgctaaagaataaaaagaaaagaaagtctcaagtgacttaaaaatcactcggctaaatagatgataatttctcaaccatgcttcctctccttctaattccagagctcttcagtatccccatcagccagtttccgaggtgctgagaagcacagaaactccgcagactactcctcagagagcaaaaagcagaaaactgaagaaaaggaaattgcagctcgttatgtaagttcattcacctttgtgttaggggaggccagcttgcctttttatctgcagccattttaccctttgactattaccagccaacacaggaacacaggataacatcctttaggagacaaaaaacatttattgtatttatagctctgtagccattggctagctgaagtcctgtgtgtgtacagatgcatgtgaggatagaatgcttcattgggcagctaacagaagacctggatgatccatattattgtttctataggtgtatttgcttccccattcatttcagagtggttggattttctgtggttagctggaattgttaagcagaaaaatataaaatcataaaaaatgtgtttaaatgcctagatggattcatgtgctgaaggatataccaaatgttgtggaataaaacatggagagacatccaagatcatccctagcctggaatgaagctcattttcctttagtggctgggcaggtcacaggagtgagatgggggagcaagctggatggagcagtgtggaggcaggcggcccctgctctgcttccctgctggtgtcctacagggccgcaggcctcatgaaaagctggaaatctggatttttacctcccaatatgcagttttttaaaataccaacaaaccagaccacacctatctgtaggccggatttagcctgggcctgtcagtttgcagcctctactctagagtaataagccaaccatcagcttcaagtttgtaactgaaaaatgtaatcaggtcaccctcttggtgcagtgggtagtgcatcagtctcataatctgaaaaatatattacccacctccatagcatcatcatgaggattaaagaaaataggacattgtcaagtatttaacactgtttggtacagctcatctttataagatatgaggaattagtctggacttacttagggtaaatgtggtatgttttgtgaggggagaagataatgcttctcacttgtcaatgcaggacagcgatggtgagaaaagtgatgacaacttggtggttgacgtttccaatgaggtatgtttgtggctactttaattttttgcacttgcccagccatatcaaagactagttgcccaaacaattagtatccaaaatatcttgaggtttgtcgttttgttattgttgttgttttttgaggcagggtcttgttctcttgccctggctagagtacagtattgtgaccacagttcactgcagccttgaactcctacgctaaagtgattctccctgttcagcctcccgagtagctggaactacaggcacgtgccaccacgcttggctcatatttaaattttttgtggagatggggtctcattatgttacctaggctgggctcaaactcctgggctaggattacaggtgtgagccactgcacctggcccaaaacatattcttgatttctaaagggacccactttttatttacataaaaattatgtactactgattttatatgttattgatctttttttttttcattgttcttattctattaagaataaggtgtcattctctactgcagtgaaggcacaccagatctctgtggtcagcctgcaggtctcattgacgtgcaatttgcagatgggtggggttttgatttttctttgggttttaaataagtactataaatactataattttggggccctcaatactgaatattttcgttagtagtttcagtgagtattgttatctgttctagcacatttgtgcttctaagcatgcattaaatgcttttggctagaaatgtccacacccaacaaccccagcattataaatgtgctgtgcttgcattactgtccacgatgttcctttgtaggatccatcttcccctcgagggagcccagcacattcccccagagagaatggcctagacaagacacgcctgctcaagaaagatgccccgattagtccagcctctattgcatcttccagcagtactccctcctccaaatccaaagaacttagccttgtaagcagctccttaccatctctctgagtgtggcctctgccaatttgatgtttgaatttgatgtttttatctttatatttctcacatttttaacaggacttttatttccaaatgtatatatgttcggtatttaagtttaattggcaaaagtatgtagagcagaataagtttactaacttgttggtgatgagtgtttattttatgattctttttgcaaggatagaagagggatatggggaaattgagtgaaacacgtcttagcgaagatgaacaatgcacattggggttacagagatggttttgtcgcctgtggtttatggtaaatttagtttggggcttgaatgtgattttgttgctagctttgtttgaattaccaagctacatatgacggcaataattttcccttcctatctaaaaagtaatctctcatttacaaaagtctatcttgacttacatcacaaatcacaaatgcaaaaatgaactgctcacccatcaggataatctccctgcaccctattcttctgtggctgtgtagttaattgcaactttgtgtggtgtgtcttttttcctcaccagttatttccttgtaacataacatttaaaaaaagaataaaaagacaaattcagttttctaataacctctggaattcacagctaaaggaaaggaaattcctcacttggtctgcaaattaggggggataagtgcgacgggctagattgttggtgttgtttttttaaattttattttctcttggccttctggccttcttttaatggcacctgctctctgcttagtctctatgacaattcaagcttggatgtgttttctaatgtgacctgttcaccaggaagcctcttgtgacatgaacaatctgccaggagcccacagttaccccagtctttaccaaagtcaccagcaagtggccacagttaggacatcctggtttgtgagcctcatctgactcagaccaatttcctagaaatgagctgctctcctctaaattcagcttcagtttatgtcttcccaaatattaggtctgctgtctcaaggaactcttttgtttctttgttaacttttctattaaagaaaatcaaggcccaagctgaagaacctcttccatttcttttcctcctttccttttctttacctttttactgtttaacgtcattgttaaaaccatgttctaattgctggtatatgtcatttcatcttgttagaatgaaaaatctactactcccgtctcaaagtccaatacccctactccacgaactgatgcgcccaccccaggcagtaactctactcccggattgaggcctgtacctggaaaaccaccaggagttgaccctttgggttagtaagaaaaaagttttttctatatttttatgctcgtttttaagaatttaaagcaatttaaggagtacagtacattaaaagtgctaatgaccagcattgaatggctgttagacaaagttacttaacctgaaccgagcacctgggaccaaccttgtctggcacatggtaagtgttcaatagaacaaagtgaatgagtgaattctgaaggcttgaatgacttttgagaatattaaaataagctcatttgaaccatagattctattttgtgacatgtttacaaatgtcttcactgttgtttcctgtgttcttcatttttcttccatccattttggtttgcagcctcaagcctaaggaccccaatggcagtaccttgtccatatccaactccatttgggattgtgccccatgctggaatgaacggagagctgaccagccccggagcggcctacgctgggctccacaacatctcccctcagatgagcgcagctgctgccgccgccgctgctgctgctgcctatgggagatcaccagtggtgcgtttgtgagcttcacaaataatattttagcacacggaggattgtcatgcttgattgattgcgacagggtctcgctctgtcacccagcctggagtgcagtggcatgatcttggctcactgcagcctctgcctcctgggcttaagcgatcctcccacctcagcctctcaagtagctcgaaaaaacagcatgcgccaccatgcccagctaatttttaaaattttctgtagaggcagggtttcaccatgttgcccagtctggtctcgaactcctggcctcatatgatctgcctgccacagcctcccaaattgctaggattacaagcatgagtcaccatgcctggcctatctattttttaatgtaatttatataatctaaggtatttagagatctgtgggtatttataagttaagctacatgtgattataatcttgaggtccattttcttttgtaaggtgaagaagtttcttttttattttatatgtctttttaaaagaatactaattttaaattttccaaaatgatactaattttggaaacttcaaacctacagaattagatcacatagtataatgaatgtaatgactctttggttctaccatgagcttcaataatcattagtataattttttaatctgtgttccacccccaagtatgttaccattaaatcctaaacattggttatcatttcaccaataaatacttctgtatatatctctaaaaccttatttttaaaggatctattctcccaggttttagaatagattttgagaaggataaaacaagtcaaatgtaactgtgcttatttctgttgtttgcttgggaaaaattctaggtgggatttgatccacaccatcacatgcgtgtgccagcaatacctccaaacctgacaggcattccaggaggaaaaccgtgagtacctttttgcctctgtgctcattgtgtgtcaaactcaggtcccttgctggccccgtagacttagaataccactagacagtgttgggggagttcccatgacttgtatttttttaccttgcaaggtatttttcattttctcttagcacaagaagagaagtaatgaagtggggttttgcattgtaaaattttgagctttaatatgtaaatgcaaattgcagaggcatctccagtagtcaggtcttctctacatctgttgcagatttcaaggcaattctttgttccaaaagtctgattattatgtgcaaacctgaatgttcaaaatttgaatatgttgggaaaagacatgccaaacctcaaaggctgaaaggaaataagggcactcttatgcttagttctgttttcagaaaaggtgacttgcttagttggcttcttataccgtgctctgggcatctggagcctctgtattcacagattccttgagttaggaaagacaaaacacaacacaccagttgttctagccttctctgaacggatctcattccaaatactttattttaatctaatgcacctttttattactacctaatcacagttgtctctgctaattggcttcatcttcccagaaacaaagattttactataaagtagcactggctgtttctttaaaatcccagctggctgctttctctcgcttctcctttgggaagcctcccccgcagatcctccttgccttgttagtcacctgtgtgtgtgcatttttctcatcactctttctgtgggcatcccctctgtcactacacatgccgtgtatgtgctgcctccccagtctccagggctatccagacctgaccctcagtagcagctcaaggcgccttctcccagaggcttccctggtagcttgcctgccttgaggtattttgtccttactgtccttcttcctgcaaaactttctgtggcttagtgtctcatttagttatctaagatgtcattatgtcagagcgttctgccctgacaaccctattatccctctttcccttcctccctattctttcctcttctactacctttttaatgcttttttatagccattatctgcctctccctcttgactataagttccatgaaaacagaacagaactttctgctattcagttatagaagcagtctcactgcctagaatggtacctggttcatagtggtgctcacggtatggatttattcagggaatggatatgtgctgatttctttcttctcggacctcccattgcttgtttattcactcccacacactcgggcacttagttttcaccctggtgttaattgcgtgccctcttctccccacatcccttcagtgttgcctaacctagaccctttctttactttccatctgaggaatccaaatctcagttcttccttttgtagcatattaatacttctctacagactctatcctaaccttcctttgttgtatcaagcacagtgctggctccacagccaagttgcttggtaaatatttggctgattaataggggagaaaagacaaattagagttcctcaagagttgaaggtataaatatcaattaccataaaattctgtgtacctgtgtgtgttttgcaaatagttgttgactaacaagtcttattgaccaagaaactttgatgtatttgaaggtgaaagttgggtctatttcaagcaatgctaaataacaaggttatacaattaatcaaataatgactcagatacctacaagttccatatgaacttgtggggaaagtggaagggttcctttagggaagaagtactatcccttttttttggttacttcttaggtaaccaacagttgtacccagagctacagcataaccactagagcaaatgagatgatgcttcttgcctcagctgctgcttcgaggggcaaggggtgtaagtgtctttaaggaaacaccttggctaagggatttggaccagttaaaccactgtggaatcacagctgctctgactcagatggtgcttctgagtcttgggctgacttcccttcatcagttttaactttcgatgttataaaatgtttaaatgtttaagatcctttagggtgggttaatggattggaggattgttgagaatttttgtttatgagagtgacagagtcacatctactgcagttggcaaatgacactttaccaggaaaatgacactactaaaaagcatgtggtgcagtcaacagagtatggttttgggagtgtgacagatccaagtttgaatttagactctgccagttgaaccactgagaagagtggctttatgcacaatttctttgtgagcttcaatcagctcattcatgaatcagggatggcccctcctcaacaagaaggatgtgaagataggaagtaagataatatgttgtgtgttcattcagtgccacatttgttacatggtggctgtttagtcaaccccagcattatttccctttcagctttgtcccagcatattattcatttttcagctacttatgtagtaggaggtacattgtgttttaggggcagaagtgacccaagaagatgggtcattggtgtgtctttatgtaacagagcatgaagacgtataaagttacattcacttatatgcatacagagataatatacttttattatagatttttacagcagaaatgaatataacagttatgtggctctccagatcataagatactgaattgtgcaatgttgtcttgtgcatatttttcaagacaaaacttttttaagtgtgctagaaaataaaataaaaaatcacctaaagtcttcctccaccatacatacccacaatgtaactacctttctccagaaagacttataaaagttatgtgtctctgttctaattatttcacacaatgaattgctagatatgatcagaaattataattaaatgcatgttccaaattaataaaatggtgtttattgtataattcacattgaatcctcttgtctgctcaggtgaattagcagaggttctacttcatatgtagttggaataacagcatagtttaatttcaacataagccaaaaatggcccttctccttcacctgctactcaaatgagacttctatggctagtgtataactatttgattaacatcacggtactaattgtatgagatgtgacatgtgaacacagcaaaaataaaagatctcacgttagtggattataggctgctcacaattcagaaatctgactcttttgcattgatttatttttataaagcaagattttcaaatgagaataatgcctgatacatagtaaaaaccttcaacgagtatttgttggctaactcactggtctgtatgctacttagaacagaattttctatcgtatttcaatgtaaaatacaataaccagacctctcattgtgacctcaaggtcgaagcccatcttgtgacacattggaaatgtggagaaggtactgtgcgcgtgagagatgagcacagcataacagaactgggcctcagagaggagaatgaggggaaggtgggaaagccagtgaccttctttaaatatgctgggtctttgtcaagatgataatccatatataacaagtttgacacacatgtttttaaaaaagcaaattgcatgtgtctggattgtttaaagtgtagttatgtcagagagtccaagcctagcattttcttcaactgtctcttattctcatcgccatgtttgttggagagccactctgctcgtagcagcttaacctgtggtgtgtgtgttcgtgttgagaggaggtcaggtcactctatttctctgactccctgcaccctctccctccagccctgtatttctagttatttgttgggcatcttagctagggatcttgggtgtatgttacttgcaccacaaattcattatattcagaaagtacttttgtaaattaggtcctcttcccagtttgccctttttttgttaactacaagtaccatgtttcttttttcctgagctcagaaactcagttactctagctcctcctcagatctcgtcaatttagtcctacaggattttatatccattgtaccttctaacttgtcatccttgcccttgcctggttcaggacccccagtacctcttacttaaattgttggaataattgttgttgtttgttgttgttgttgttgttgttgttgtttgagagagagtctcggtctgtcacccacgctggagtgtagtggctcaatctcagctcactgcaacctctgcctcctgggttcaaatgattcacatgcctcggcctcccaagtagctgggattacaggcacatgcgccaccacacctggctaatttttatgtatttttagtagacatgaggtttcactgactggtctccgaactcctgacctcaagtgatccattcccctcggcctcccaaagtgctgggattacaggcctgagctaccgcgcccaacaggaataattgtttttaattcctcctgtccatcctactccttgctaccaagtttattttatgaatagctttgcccagtaatggcacactccctttatccctcaaaaatctcttcagtcaattctgggaaggtctcaggctggcattctggtccttcccttttatagcattacattgattttaattatatagagatatagatctggtatgttttttcagactatgcttggccagttcctccatccacctactgtgtagttattattgaatgaattcctggattaaaaccaattcaaggatttcccagctcattttacctcatccttttggaacttttgctctctgctattcttgctatctggaatattttttccatctttctctttactcgatggtatcttttcattctttaaaaacccatctctattaccatgtctgtctctcatccaacataaactttctttccttttcaaaacacttcagaatactttccattagaatgtgacctgatattgtcatttctgtacttttctctcatcatgctaactagattgttagtcacttgtgggcaagaccaggtgcattacctagttttgtatccttagcatgacgtttgcgtcagagtatatggatgggaggtacttaacacattgtgcattaaattagttagaaacagagtagccctttgcgcctcggtttctctgattcctagcaatgttgacttccctcataccttccaggagtatttgctagttacagtcaaagagtttatcgaaatctgataataagtatgtactagagctttattatttccagttctgagtgccttctatgtatactaatagcaaacagagggccacattaatgtcattaatgaaagcaggctcttggaattcatttggactctttgaaaggactcttgccaggaacatagtaggtgctcacagagtggttgttgttgaggtgaaggctgtcctgttgaaggccttgaaggaaattgtgtgcctggtttcttaactatttgaaatctcagtgctctttaataaccatttagtgattctagactagagaatgagatggcttttctaataaattatcattaagaatgtataacaccatctaaacttggaataatctttctttctcttcctttaagatttagtcttcatgacctcctaattgctaaatcaattagcctttttctcggccatcatccctcagaacctcagcctttcacaagcgttactgccaccttctccttgtctgaactgaaatctggccgtctcctgagatcatcccttcacttgcagccctatacagggtgacctttccatttcattcactgacctcagcaccagcggtggggttaataacagctgtggttgccaccccttctccagcctctccatgaacagaacttttctacctgttggtgaaaaccttgctcctttcaggctcgtgccattggactaccccctcttccaccttgttgggagtatttccccagtgtattaaagacttgatacatggctgagagtcttccactacccagaggctgccataatcctggttgactctggtatctacaaagacaaccccccagtatcttcatcatggtcttggaccccctcatctctagtgaacatctgccctcctcaccttcagttacctgtatttacaggttcacaaagaagagcttatcatcacccctgtgtcacctccagattctaagcgtcccatccagtacaacctactgtggctccagtcagccagagtgctccacgttctatttccaacttaccactatctcccaggctctagccactgcttctcctctagattactgtgtagtccccagactagttgtctttcgttttgccacctacactccattcttcacccagcaatcagaagatcatttgaagacgttaactgaatcatgtcactttttttgcacaagtctccagaatcatatctgtactcatcacagcctatatggccctttttagtttggccttgcctgtcccttcactcttatatcctatatgctctccaccgaatgcactctggcctccttgcttcgttctggtctcaaggcctttgcatttgttgttccctctgcctggcacgttccccattacttatttgtaaggcctgtgtcattccttcagctctccgcgcatatgctgcctcttcagagagggccacctgactgccactgtgtgctcccctactctcttttatctgaaaatgtgtgtgtatatttaatggtattttccactgtctgaggtgtttatcaggtatttatgtttatctgttacctgttttcctctctaggatgtagactagtggaaggatagggactttgtcagtattgttcacctgattccccagcacctgatggtaactggaacatacgaggcatttaggaagtatttgctgaataaatgaataattagcacgctttcttgctctggccttcgaatttgccatattcctaatcatcatactgtcttcagacaattcgtacccattctttatgttgcagccctattgccattttctctgtccttttcactctgttaaattcctagactaccatgcattgttcactgcactgaccatctgacattttgatagttacttatgtgcatatctcactaatgaatgtgcccctcaggctgtaatttcaggagaacaaggtgtgtgcatttctttcttattccattcttaccataatgcttggcacactggcatactcaagaaatatgtgttaagtgaatgaatcttagtaaattgtcatgtgattgaacatcttctccccctttctattttattatctctgctaataatctacttccataactactctggccggagattccttaaatgtccacattctttgggattctgtatctggtctgcttttcactgcataatctgctctgggattcttctttccgtccccttagcttcagccatcacttctttatggatgatatctaacctgacctctctcctgaatcacagctgtttggatttctgccctgaagttcaagaaaaccaattccttcacctccccataggtgtacccttgagttatgctttcctgtcatctttactaggtaatgcagtctacctagtcacccaggttcttagccctagggtcctcttcagcatctctctctcaggtcacacatccagtgtatctccaagtcctgttgatttgatgcaagaaatgtcttctgtccattggcttcctagcttcccacctccttcccctccagcaagtctcacatactatgttcttctacaacgctctgtagtctgtggaggaagtaaaagcccgccactgtctagtgccctcatcttccacagccacaatgcatgcgtcattttttctgggagcattcaggtagttgaggaccattcaataatggactgaattttgatgaacatggccagcctgtaaatttttgcattaaggaacgataaactgttttaatttaattctacaacttccgcagtttggtccagcttcctgtcctttacgcacccacaatgctttcccttggtatgtcttttgtaaactattttctgtaagcagagcagattcccaagctccgtgcccaagtagagtagcatcttttccaaaatgggctgttgcctatgatagtccccaagataggcccagctgcctcctgcctgccactggcgtcttctgcttccagaaacctaacatgcgtcacaacagcctcactcgtcccttcctgacttcagtgccctaaaaataaaaatgagtctgttgggggagacgctcttacttaagttgcattttaggaccaaatgcttttaccacctgagggctttccctggaaatgaactggagatggaactgccaagagatactcacaggtaggcctttggggctgtcaggatgcctttttaggttctcattccatttggattgactaggatttgtgattgtcaagtctgatcaaggttttaaaatagggctttatctttttttttttggcacatctgtcatttcaacgtctaagcctagaggctcttaactccttaaagcttcctgattttggcctactcatctcccttagtaagtcccttgccgggaatgaattgatctataggcgaggtctcatcacaggcctctgattcatccaaaggagaaggcaatgcaggtttatagggcatccctgaaaggtggctactgcacttgacggtggttatctcatttaattctgtgaggtataggtagtgttctcttcattttagagactagaactgctgttctagtttagagattctaagtaactactgatgtcccacagcagcttgtacagagtcagcctgagatctggccctgtagcagcctagctgtatgattctggaaattatgttctttacactgtatggacaaattcgatttgttcgtaaatcacaagtggcactgaaggtgttttatttctcatctcattacactgaacagttaagtgacatttttttacattcccctctttcttttttcctctccattgccttagagcatactccttccatgttagcgcagatggtcagatgcagcctgtcccttttccacccgacgccctcatcggacctggaatcccccggcatgctcgccagatcaacaccctcaaccacggggaggtggtgtgcgcggtgaccatcagcaaccccacgagacacgtgtacacgggtgggaagggctgcgtcaaggtctgggacatcagccacccaggcaataagagtcctgtctcccagctcgactgtctggtgagtgaacatggatgaacaagacttagactttcattcagaaaacaggaggggctgatgagagaactgtatgtatgagcaacaccacacagtattgatcccaggtggatagttgctcttcaggggactgcgatctttcacttggaggtgtgtcttttgcttcctagacacacagtgatctagttcttcatgtgtggcatgtgcaccatactgatttcattaactctgcctcccatgggaaaaggcaaaccgcttgttttcctctctgatggttaagcaaactaagagcccatacagtgactatgagtgtgcacctaaatatcatctgtcacatgtaaagagtaacttactgcctcatgtggcaaatactagatagcccctcagctgcttcattggccttttcccttgagttccttaggaaatgtcagtttagtagaatttttgctatagcatgaggctacatcagttgaacataattaaatatacataagattcccgtaacctcatgagctaggaggaactttttttttctgtaacttaacactccatgatcaagtcttgcctctggtgcagctttcatcaaatgcatgatgccctttagtcacgtaatgcaggcccaggcaaaaggaacagactgccagggatctaccccctgaaactttcttgacatcagtagcaggacctttcaacagcagaactgagcctgagtctaccaaggttccaagtttggatactccaagactgtgagagctcctgcattagtgtacgtgtgtatctgtgtgtgcaaatgatgcaagcagttggttaatttggtggtggtgggagtgggtctagagctttgcattttgatgctaattaagattaaatatctcagtactacattttgtagatcaactttaagtacttccctaatttcatgtaattttctagcattaatccactttatcattgtcataagtataaacggctcattaaaccaggagggaacacaatacttttatggatttctgctctcatgttaatgctgttttcctttcctcatgagtaatctcttgatggtttttgtctctacagaacagggataactacatccgttcctgcagattgctccctgatggtcgcaccctaattgttggaggggaagccagtactttgtccatttgggacctggcggctccaaccccacgcatcaaggcagagctgacatcctcggcccccgcctgctatgccctggccatcagccccgattccaaggtctgcttctcatgctgcagcgacggcaacatcgctgtgtgggatctgcacaaccagaccttggtgaggtaggttagcaggatctgttaccaggttgtgaggaggagccgattttaccatattttgccaaagtgctgtgtatataggtatgggtgtgtgtgtgtgtgtgtgtgtgtgtgtgtgtgtgtgtgtgtgtgtgtaaagtgatataattatcttactaaaaattgttcagaacaggtccattttaagatgttaaaaataaattatcagtgtgaaaatcttgttttctgtagtacttgaacttcataaaatgaggtcttttttccttccttgacttatactaaagcatcgccaatttgttttaataaaatgaggtcaatttgacataattaatgtacataaagtttccatgaccccatgagctccatggacatctgtaatttgccatctgtgcttgctaacaaacgattattgttgatagagcctcactgagaagattcacagtgtatggtactgtcttgagtgccatacacatctaacaggttcattccttcagcagatatttagcaactcccatgggcctatgcactgtattgggtgcaactcactctgaaatggtctagattatctgttgtcccacctttgaggttggatagatataactttacaaatgagattataaaagattggtgttggtagatgggaaaagctctgaaatgattttctaggtgtcaataccctaagagattagcaagcaagtagaatgatcagctacaggtatgaaaaggttgtaaccagaggtagctacaagtcaggtgtgtaaaagaagaaggctttactatctgttatttcaaagtactgaaacctatagatcccaaaacaaatcatcactttcattgcttatcaggcagcctcttatgagaagctgcttctaaccctgttttctcctggtgaccttggtacgttttgccatgagtgattcctgggccagtagttcacactgagtgtctttccaggtgccttacttgagagcctcgccttccgtcttgcacagccacccacagacacattgctgctcactggcaggactggtcctgtcgctccctgtgccatccccagtccttctttaaagggaaaattaaattctctctccctcataccacagtaatagaataggtctcagaatatatctttagttagtgcatatatgtgtaggcgtgttttcttttgttaatttcagagatttttttcccattagtaatatcagtcatgttttcatgaaaaagtaatttgaggaattcctaagtattcaaaaccaagcaaaaagtacaggacatgtggcatctctttgtatatgctttgttattactttgaataattagaaaccataataaaccaaaatgaaatctacaaataaggcctgcattgaaattgaatcatcaaggaattctaaattgattttaactaaaagctaacttttcaagggctttccctccattttgacattttcaggcaattccagggccacacagatggagccagctgtattgacatttctaatgatggcaccaagctctggacaggtggtttggacaacacggtcaggtcctgggacctgcgcgaggggcggcagctgcagcagcacgacttcacctcccaggtatgatccgtggctgaggcattttaaagatacggttttaggctgaggtgggcggatcaccaggtcagggaatcgagaccatcctggccaacatggtgaaaccccatctctactaaaagtacaaaaattagctgggcatggtggcatgtgcctgtagtcccagctacttaggaggctgtggcaggagaatcgcttgaatgcgggaggcagtggttgcactgagctgagattttgccactgcactgcagcctggcgacagagcaagactctgtctgaaaaacaaaaaaaaacaaaaatgatacggttttatgaaacatatcacctactgaaagaagaggcagttcacttaccgtgtgatgatgtcacttttgactctggattaaccactttgaagtctcattactttgaaatcgcccatttgactttggttctcccctgtacaattcaaattatcttgattttcttcataatttaagtagtatctacagaagagatagtacctcccagataaaagaagcgtgtccactgtggccactgtcaccatcacctgttttaattctagatcttttctctgggctactgcccaactggagagtggcttgcagtggggatggagaacagcaatgtggaagttttgcatgtcaccaagccagacaaataccaactacatcttcatgagagctgtgtgctgtcgctcaagtttgcccattgtggtaagcaagcaccttttgtccattttctgtcaaccagaattgctccttcccccttcctgtgtttttatttccaagtcgaatccttgagttcattaccatgcccctcttcagaattctattacttcctgatacatgcctgcttccccaacaccatgtaattttctggcattaatccactttaaccttaaggattagtgactcgattaaatccagaaagataggctttatttttgaagtgaaagttattttttacaaatggatgagttttctgttaatagtttggtgttctataaagcaaatcttggtgtctgacagagtaacacaaacattgcctttttcaaaaccctttacctataggcaaatggtttgtaagcactggaaaggacaaccttctgaatgcctggagaacaccttatggggccagtatattccaggtaacatggaacttgttaactaccacttatgtttgtttaatcaaactctctgtgcattctctcagattaataatgtgcagaagtgtcctgggaggtcagagctagtattatgcacattgtacagagaaggaaactgtgtccaaggagaggttaagtgtcacagcaaagccgtggagctggggatagtccccagtgttctgagctcagagccagtgctgtgcctgattcagtgctcactgttgcttcatcatcaatccctttttggagtagaggttttatgtcttctgagaattttatacatgtatgtcttttgtaatttttaattttaaaacttgagcattttgcttaaatacactcttgttagtagtagtagtttttttattttattttttccaaagaagagtgttatggaaaagtttgataaaaatcagttttataaacttttattttccctattgactcagtggaactttgtatagcttgtgaaattatttgtagaaggaccaaattgtagacatagtacacatatatgcacgcgtgcacacacacgctctcctcctctctcctactggtatgtgagaatttcataggcaaggtgaaagacttgcctttattaaccttctatatttaggatgttatttcctagtgttcttttttacaagcaatataatagacttgcagttttcttgaccaagtggtattatcataaagtagattaattccatcgaatccaaaatagtatgcaagataatcagtaggacaaaaaacgccaattgttgcagtcatgaagcttagaatttaatagagcatttttcataacatggattatcacttgttagatagtcccaactgcactttaaaaaaagagtagtacattttttatagtaagcataagtactatgtctttaagtgtttaaagtattcagagtcctggttaaaatcctgtgttgttttcattttaaatgagcacagtttagttaaaagttaacattgaatccttcatactacagttgaatatggtatacaaaattctatggtatgtttttaactgttgaacctctcccctctcgcaaatttgtgtcacatttttacagtgggaacattaggctttttactaggaatatttttacattctttttttttttttaatgtattctcagtgccatttctcatatctgatctcactgaactctgctgcatccctctgaggtggtagacaggtaaaatgtctacctgtttgctattgtaaggaaactgaggtgcagacaggttaagtgacctgtgccgtgttccacagctcaacctgactccaagccatctgtttgaagttgagggtttttcataccagtaacaccccgtcttaatggtagaatagggtttgaaataaggtcttgctttgccagcagaggtgctcatgccattggcttgcctgcctagctgatgtccccaggacagaagcctcctgactgacctggtgaggtgtcgccaagggtggatccgatccacctctgccattttaagaaagtgccacgtggtggctcatgcctgtaatctcaggcataatttgggaggccaaggcaagaggatctcttgagcccaggagttcgagaccagcctgggcaacttagtgagaccctctctctacaaaaaaagtttgaaaattaggtgtgattggacacatcagtgtcgtagtcccagcatctcaggagactgaggtggaaggattgcttgagctcagaaggtcgaggctacagtgagccatggtcacaccactgcactgcagcctgagtgactgagggagaccctgtcttattaaaaaaaaaaaaaaaaaaaaaaaaaaaaaaaagcagcagtactgtccatgaccacctttcacctttccttgactgggctttctgtttggtcaaggagcacattacatttgcatttgctctaagtcctccatactcatgggattttctttcagtatttaacatttttgattatatgtttctttcctagtccaaagaatcctcatcggtgcttagctgtgacatctccgtggacgacaaatacattgtcactggctctggggataagaaggccacagtttatgaagttatttattaaagacaaatcttcatgcagactggacttctcctcctggtagcactttgctctgtcatcctttttgttcacccccatccccgcatctaaaaccaaggatttcagatactcattgcagttgtggagtttaatcccctttcttaacctcacttcccacttgctattgaattgtgaatagtcattaaaaacctgtgataccaaatcttcagctgtctacttggaagaacatggaataagcatacttaacagtgaaaagaatctttaattatgtattatatctgtaatatatttattttgtttaaagaaggctttctaacaatgactgactaaataaagctgtctgctcctgcattgataatgaaggtgcgttgtatttgatacccctccccccctttttttggcaaaggaggggaaaggaaggtttaaaataattgatttaaaatgtcactaagtgtagactgatgactgtatagagatgtgaaatgtataattacacatggaagcaatatgttgctgtgttgttattaggttttttttgtttttgttttctacatcttttaaagacttttggaaatttggctgaacaattagaacacaacaggccaactcatactcatttggatctatttagacaacgttaaccaatatatctatagctttagattatattcgataaaagtaattggactttttttctttttttgactcgttgacaagtgtctttgtaatatgtttttagttccctttttttgttgtattataggcagatgaacaaattaaatttggcctcaaagagagaacttactcccttctggatatttttgccacatttctttgcaaaaggagatatatatatctttagtcagttttgttgttatgagaaattatgggttattttgtggcatgctctttgggagctgcacagttatggggaggactcccactgctgtgcaagttaagtcttttacaaaacaaggacagcagaggagggtttgcagagacctccctctgaaaaacacaaagaatggactctctcctgggatgaggacttgctttctttacctccggttctttccatgtcttagttggatgtccctgaaatggacacaggctgtgccattgtgccagaaacattgtgttatcttttatgttgttgttgttgctgttaaactataatatgtgacttctttttttattattttttgtttgaatgctttaaaaatcttttaagtctgtggatctgctgatgtacagtgcctttgctgctatggatcaaaatcaaaagaaccgtgtagatatactttattgtataagtagaaaattacttaatttcatactagaaatggatggatgctgcaagttgaaatggactgtccattgacgttcctaatgtggtagcagaaaaaaaaaaatggtgtcttaagtgcttagtgtttgatgtcattaacagtttcgtaaaactctacagtgtagaaagattttgatactaaactgtgcgttgtacatagttctaatgcattgtattgaccaccagtacttctataatggtagattgtttgtgaattcagacttttaagcattaaacataaataacttctagtatgcttatttttctaattctttgtcttgatgacattagtttattttttatctttggctgtgccactcctatatattaaaaatgcctagttttttcaagggagattgttgttaaagtaaagtggttttttttgttgttaaagtaatgtgggtttttttcactgttgctgtttttgttttggttttgtctttacttgagaggagctagaaaaggtaggtgatagaagttaacagtgaccagttggtgctaaatatttattgagtacctctttgatttataaaaatactgcttaccaaaaggttatcatgtccctcaaacccttgatgctttagagctatgctgttcaatatggttaccctaggcatttgtggctctttaaatttattaaagttaaataaaactagaaatctaatttaccagtcacacaaactacatttcaagtgtcaagtagccacatgtggctaatggctaccgtattggactagacacatcaacacgggctttaagttagccaatgtaaaccattgccagccatgtggatttgggaagcatttctagcataacacactgaggtctttacaccaggcttcttgggctgctactggttgggtgtatgaagattcagtataaagaggagtttaaattaagaattctaaagtgctgggactcaaaaatccgacattttaaggttctactaagtaggaggattggaagccccacagtagtctggagggatcatctataagagatacttcggttgctgagttaagtacagtattcatcagttggactggaagccgcacttccattgtgataccatgtgcgttgttacatcaaatgatgacacacaagtcattgaaggctggctgaaaaattaaaaaccataaaaaacatgggggtaagtgatcatcttcaaagatgtgtccctagacaggatgatggagtttatgttggactgggaaggaataatcttcaatatctgctatgtacagagcactgtactggcttatattacatattttatatatatacgtatatataatatatacatacaatattagccacctacccattatctcaggtttttcacagcttgtgtacctatatggtccaaagatttggaaaccctaagggaaaagcaagtctgaggaaggtactaatgcatcgagtatatctgtacacactggaagactgggggcgtctggagtaagagggaggtgattatctaggtaaggcacagagcagagttgtccatgtggaccgacacagtggaccacacattgtcctaataacatctgagctctgggtggctttggagaggaaaagctggtgatccctcatagagtggcaatcccagggtctggacggcagcatcacctggcctccgagagcttggattcccctccccacatgagacactgcatccccttcccgacagcagggattgtgtgaactttctcctctagtgcccagctatatatagtagtagcatatatatatagtagtaatctttgctgaattgggcagattaggagggtagtgagcatagaaatgtaagttcttcccacttttaaagtattcctccattaattcttgtgtaacgttattaaaaatgtttaaaagatgagagagctttggagtaaaatagctttggcacaaaagtatgacacatgcacagtgcacctctagaaggtggaacgtgcctgtctcaaggggttggaattccttttgggtatctgatgggtgaagtctgtgatgcctttagttatctttagagaaatccaaaacattggctgttgaatggaataaaaaactgagatgaatgcatagatttaacttttttagacaagtgggcatctatttcctttcactgctaatgtattaccaaattaaatttttaggtctatatataaagctcagccctggcttgatgtgcacagtcttgatgttcttgatgttgtaattataatgttaaaagtaattgcttaaacttggtttttaggttaccatagtttttgcttcaaatgtagtcttgcagagtctgaagaagaacaaagatgggaatctccctgaaccagggaaagcttagtttcaatgagagaagacagcagaactctcaggacactacaaggaaacccagagtaaggaaagcatcatgaccttcctaagattggcgggtcaaatggagagtgacagaacctaagtccttagagtatttatggatacacacctcgctttgggccactctttagcaatatggcttcatagtctgaggtgcaagagatccagctttgtcctaaaacagtgtatgttggaaccttagctgcagcctcagaatacctgcaagtggttggaaattacacagccttgggatatccaaaaacttggtttcaaaccatcacacacaaccatgtaattctgggttcctgcagccaaaagcaggggaaattgatgttcttcagccagaagtagtattctggatagaggtgctgtgcgcatgctagccttataaatatcctcaactgtcaccttatctacttctagacatgcctcaatctggaaagttttacagttgtgctgtcctagaagcaaagtgtccaacttaaggtatttgttgattgatatttttgacagttttatggaaatttgttctgagattccgtgtccagtgttgagtaagcaattacaaaattatgaagatgtcagtgccaaaaaaattatttatttgatattcttggatgctcatatccaaaaccaccagctgctgcaacttgcaaagaggcattcaacaagctccaaggtcctgcgcccaacagtttctcactgtggcagcagctcataacgacccctgttcttttgagctaattgcatttatctgccttttggttgaaacttacattcagaactaacaatgaaaatggcttatttttgatgacctgagcatattagaaaacctctcatgtattagaacattttaagagtaatgctatcaagatagaactcttaccttgcaagcagtttagtttgcatttttggcagcctgtgatagaatcttgtgggtcccagaaaggaattcacaggagactctagtttacctgtcctcagggaaagaaaattctcggctaagacttcagatatttggcctgcagagagttcccacagggttgcctttagtccagaggaaaatgatgagcacaagtgttttcatgaaagttgtcccatttgatctcactgcaggcctagccagggtggacgctagaatcctgaatttacacacaagagcaccaaggatcggaggagaaaggtgtttacccaaatccgttatctcccgggggtacaagctcaaggctcctgacttgtggtccagaattctgtactgtctgtccagcatggcaggttggaacacgaaatgaaggattcaagacacttcattgctctttgtctctcagtttcacacaaattaactggcttctggtttcagcatcacagaaccttttgacaactcttgaaatcaatcacaaattgtcttctttgttcctgtgctgtgtgttcccactgtggactgaatgtggtacgtacaatgcagatacccactcgcgtgtgagtagatgtcccctgtatgcgcgacccttggcatctgctgcagggagcccattaacttcaccctgcggggtgatgagaacattgggaaggttattttggaagaagatttaaactcacataaatgtcatatttgacttgggtctagcaaaatacacacacgaaggtacttacgaagtagttaagttgttgaaaatttaggcagcagaattttgggactctgtttaggtaggatctaacgaaactcatgccctagtgtttctggatggccctgcatttctccctagacttacggagcagttggccattacccagtctccactagacaccccccctgcctcttccaagaggaactaccatacttggtaccctggctgtatcttatgtggcagaaagtatgagatgagctagggaactttttattctcaggaggctgggaagttgcaggagaatgaatgagtggtgggaactgagtcaagggtgaaatgcaggcattgtgaccatgagggctccatgaaggaagactgtcagaccaagcttgtgtccttcctcctcgtcccagcagcacagggactgggagagatactagcaggaggcaccacaagggcaggagtgagactccaggaccactgtgctgcaagcactgttccttaagatgacttcccattgcttgaagaacttcagttggacgcctctttgccctagaagagttgagtttaaacaaatacctattcacttaaacacctgttaggggtcaactttggataatgtaccaaatgcagagaagcctgttactgccgagaataaagcatccctctcagaagtcagctggtccttcccagatacgtgaaaacaagactttgtttctggagtaattgaagaaatcaaccgttaaaccttgctcttaaatctccgtcagagattcatagcccctttcatgtttcctctgagtaggcaatcagtgttaatgaaatgtgatttcaggttttatggctgagtcaggaaattcaaagttatggtttccacgctgatggttatcccaccaccacctgtgcagctgtaggaatccaggttttagtatgggcaagaacagcctcctgggcacaagaaggttgtaaaggttactttgagaacaaaggccttgatttgcagacacttgttcctgagtgatggtcttaaaaacaaagcataaagtgcccctaataagaaggttagtggtgactcaagctgacagaaagtgaaaggatttaactacaatccctgaggggtagacttacacatttttgagtcacctttgcatttaccttgagaggctctgcgtgaggtggttggcttgtgctttgcagacatcctgctttgtatgcagcatagacttcgagcaggagacttagcaaccagacttccagctcagctcttccaacttcagcacacagcatttgcagtgtgtgcgtgtgtgtgtgcgtgtgtgtgtgcacttttcttgccaaagatttgctcatgcacaaattacagaatacagcgttatggtgtctttttcatatttcataccactaggtttctagaactcattaaatttataatctgacctcagacctgcaggagagaataagataaggcaatctggtgttgtccaagcttacaaagtttcatctatttaaattgttaaaaaattttcttattttcatggtgacaattgtcacatcataatttacctctgtcatccaacattttcaggaagtgaaaaattgcatgttaattttttagaaaactgatatttactccttgaaaaactgaaacaagctttttgattgaaaaatgttcatatgtattgaactctcttctacctttaatcccaaatagctgggattacaggcgcctgccaccacacccagctaattttttccatttttagtagagacagggtttcactgtgttggccagactggtcttgaactcctggcctcaactgttccgcccaccttggcctcccaaagtgctgggattacaggcctgagccaccgcgcccggccaagtaatgcagattgtgtgtgcaccaaacatgtcccatttagtagcaccccataatgaagcacattcatctttccggggcaaagcgtctgaatgttcatgttcagtggagtaggtaatgactataaacatatacaactccgtttaggttggttttgtccccaaatgcatcacgaagaaacttctagcttcctctgaattttttattttggaattgaaaaggagtttgtggatctatgtttttgttctcattttgaagatgaggaatcagattcacagaggttaagtgacttgatcaagggacaatgacagaagcttgctctgatgccagagctggtgtctcagcatctgtccactgtcagtatgtgctgtcatcctcagggactgggatgacaacactatctagaatattcttttggttccctgttttgtattgtctcccacatactacttccatatgttctctgcatcttttctaatcggtcattgaaaattactttttcactatgcccaataaaaaaatccatacttctttaaaaaaaaaaaaaaacaaagtaaggcatgggctttgatacagaccgtgtgtccttggccctgcgaaacttggtttttaatttgatgctatatgtgactcatctaatctttagatgagaggcattgttaaaagctgactgggcacggtggctcacgcctgtaatcccatcactttgggaggccaaggtgggtggatcacctgaggtcaagagttcaagaccagcctggccaacatggtgaaacccggtctgtactaaaaatacaaaaaattagccaggcatggtggcgggcgtctgtaatcccagctacttgggatgctgaggcaggagaatcacttgaacccaggagatggaggttgcagtgagccaagattgcgccattgcactccagcctgggcaacaagagcaagactctgtctcaaaaaaaaaaaaaagctgtgtgtgtgtgtgtagagagagatatatatatatagagatatatatatatatagataattttattttatttttattatttgctttttgagatgcagtctctctctcttgcccctgctggagtacagtggtgccatctcagctcactgcaacctccaactcttgggttcaagcgactctcctgcctcagcctcccaagtagctgggactacagacaggcactaccacgcccagctaatttttgtactattagtagagacgaggttttgccacattggccagactggtctcgaactcctgacctcaggtgatatgcctgcctcggcctcccaaagtgctgggattacaggcatgagccactgcacccagcaactgtatatttcaatggtaatgaaaacatcaacaaaaaacatgcagcatcaaaaatatctttaaaattttctgattggagacgtctcaatccatgttttattttttttctcctccaaacttagatcaatgagacagaaaattaacaacgatattcaggacttgaactcagctctggaccaagcggacctaatagacatctacagaactctccaccccaaatcaacagaatatacattcttctcagcaccacatcacacttattctaaaattgaccacataattggaagtaaaacactccttggcaaatgcaaaagaacggaaatcataaacagtttctcagaccacagtgcaatcaaattagaactcaggattaagaaactcactcaaaagcacacaactacatggaaactgaacaacctgctcctgaatgactactgggtaaataatgaaattaaggcagaaataaataagttcttcaaaaccaatgagaacaaagacaacataccagaatcttggggacacagctaaagcagtgtttgaagggaaatttatagcactaaatgcccacaggagaaagcagcaaagatctaaaatcgataccataacatcacacttaaaagaactagagaagcaagagcaaacaaattcaaaagctagcagaagacaagaaataactaagatcagagcagaactgaaggagatagaaacacaaaaaacccttcaaaaaagcaatgaatccaggagctggtttcttgaaaagatcaacaaaatagatagaccgctagccagactaataaagaagaaaagagagaagaatcaaatagacacaataaaaaatgatgaaggggatgtcaccactgatcccacagaaatacaaactaccatcagagaatactataaacacctctatgcaaataaactagaaaatctagaagaaatggataaactcctggacacatacaccctcccaagacaaaccaggaagaagttgaatccctgaatagaccaataacaagttctgaaattgaggccaggacaatatggattcacagctgaattctaccagagatacaaagaggagctggtactattccttctgaaactattccaaacaatagaaaaagagggactcctcctccctaactcattttatgaggccagcatcatcctgataccaaaacctggcagagacacaacaaaaaaaagaaaatttgaggccaatatccctgatgaacatcgatgtgaaaatcctcaataaaatgtggttagctttttaaaacataaacaattttgtgataattttttttttagaaacatggtgctttttgttctggcctggtttctttcctttccttttctttctttttttttttttcttcttaaaaacaagtactttgtaacatgtacattcttgtatgatagatgggccacaagggaagcttctccttgattacttttgtgtgttttgattcatgaccccataaaggcccaaccatggtggttaaacaattgtttacagtcatgttaaagttacactaagataacaggaggccccgttcacagaatagattgatgggcttcaaggcaaaggacacaggttgcttgaaatcttgattgccacaattctgggtgcacaaagccattttaatctgttgctcaagtctgagggcagtctgattatgtggcctgagggctcagtgtcacatacatgtattaaagaaggctgactctctccccattgccaagaacttagggaattcagagagatgactgtagagttttaattaagatctcatcacagaacttggaccagttaagttactgtctgaattgctttcctgtgaaaaacaagggctgccagagccactgcaggattcatagctatttagatgagtgcataattggctccctagaggagaattgggcagctatgagtgttttaagtgagatcatcttttcgggacgttgcaaaactataatcctattcatctgtagttcctgagaaatctttcctgaaacctccactgtccagggaggtatgattgatgtaagaatggaaagttgaccccttgctccttccatccttgctttggacataacaatagcatgcaatgccagtggcgggcacagaggcagtaataagcatgaggtcttccctcgattccttcctcttaagctaagactgaattcttagtgaatatttgttcttggaaccattactcgactaatatgtataaaagttgtcatataaaatgtgataacgatcaaacagattggttagaaaagttgcacaactttttacaatgcagattgggggcagataaagttttttaaaaggcaaattctgtttttactgtaatgctttctaagaaagaccatattttaatgtctaggtaaatacacaaaccatcagatgtgtatggccacccgtattaaagtcaagcattaggtccaggtgtctggcttgggcagctgaatggctggcagtgtcatactctgagataagtgaggtgtggggaatggcatttaccatgagacatacacatgaaaggtctcggaggaaagtgaaaattaagtctggagccatgagaagaacgtctaggcagaggtgatagttgtcagtatctccatagaaatactgccgtggggatgaaggagatggcctcacagtatgtagtgaggggaggaaaggcttggacagaatcccgagaattaagataggcagatctaagagaagagaaaacagagctaaaataattgggccacgggctgtagtcaccagcctataagatggctgctaggccgggtgcggtgtaatcctagcactttttgggaggccgaggcggccgagccacctgagggcaggagtttgagaccagcctggccaacatggcgaaaacccacctctactaaaaatacaaaaattagctgggcgtggtggcgagcgcctataatcccagctacttgggaggctgaggcagcagaatcacttgaacccaggaggcggaggttgcagtgagccgccatcaggc

SEQ ID NO: 423 - DNA, 35944 bp, Homo sapiens
gagtatttgtatcataaaagggtttttaacaggagcaaatgctttttctgcatcatatgagatgatcatgtgtttttgtttttatttattattattattattggtagcattttttttgaggcagagtcttgctctgttgcccaggctggagtgcagtggcacgatctcagctcactgcaacctccacctcccgggttcaagcaattctcctgcctcagcctcccaagtagctgggactacaggcacccaccaacacaccaggctaatttttgtatttttagtagaaacggggtttcaccatgttggccaggctggtctcaaacacctgacctcaggtgatccacccgagttggcctctcaaaatgctgggattacaggcgtgagccaccgtgctgggccgatcatgtggctttctttctcattctgtcaatgtggaatattacctcgattaatctttgtttgttgaaccatcaaggcattccgggaataaatcccacttggtcatgatgtatagtctgttaaatatgttgctagcattttgttaaagatatttatatcggtatttataagggatactggcctataattttcttttcttgtggtgactttggctttggtagtagggtgatgctggcctcatcaaataagttagaagtgttcctttgtctcccattttttggaaaggtttgacaaaggttggtgctaatttttcaaacgtgtggtagaattcatcagtaagccatctagttcagagatcttgttgttggaatgctttggttactgattcaaactccttactagttataggtctattcagattttctatggcttcatgtttcggtcttggtaggttgtgtgtttctaaggatttggccatttcactgacattatccaatttgttggcatatggttcttcacagtactcttataatacatttttaaaaaatagaatccgttttaatgcctctttttcctttctggttagaattattctggttagaattatctggttagctatattatcagcagtttctttgtggttatcgtgggaattgcatgcaacattttaaaggcataccaatttaatttgaattgataccaatttaactttaattgcacacaagtggacttataaatatctccacctcctgtgactttatgctatttatgtccagagtacgtctttatacaacatgtactcaactaacatagatttataattatttttatgcatttatcttttaaattctccagaaaagaaaaaagtgaagttacaaaccaaaattataataaaacgtttcttttttaaccatgtgcctaagcttactgaagatctttatgtctttatatggctttgaattaccatctagaatgattttattttaatctaaaggatccctagtctttagcatgtcttgtagggcagatctagtgataatgaactccctccacttttccttatctgggaatgtcttaatttctccttcatttttgaaagacagttttgccagatatagaattcatgattgacagatttttttttttctttcagcactttaaatatatcacctcactgcattctggcctcaaaggtttttactaacaaatccaccaataattttactgaggatcttttgtatgttgtgagtaacttctctcttgccgctttcaagattatgtgtgtcttagacttttattttgattataatgtgtctcagtgtgagtctctttaggttcatcttacctaaagttcattgggcttcttggatttttagactcgtgtatttcatcacatctgtgaaatttgggaccatacttcttcacaccacctccttgccccgttctgtgtctcttctttttctgaaactcccctaatgcctatagtggcctgcttgccagtgtttcataaggccatgagactctattcccttttgtttattcttttttttctttcctgttttgctcctcagactcaataattttaattgtcttgcctttaaatttactgattctttcttctgctttctgaaatctgcagttgaaatccctctagtaaatttttcaattcagttgtatttttcagctgcataatatatatatatatataaaaatatatatatatatataatttcaacttctctgctgacttttttttttttttgagacagagttttgctctgtcacccaggctggagtgtagcggtgcgatctcggctcgctgcaacctctgcctcccaggttcaagtgattctcccacctcagcctcccaagtagctgggattacaggtgcgtgccactatgcccagctaatttttgtatttttagtagagacagggtttcaccattttggccaggctggtatcaaagtcctgacctcaagtgatcagcccacctcggcctcccaaagtgctgggattataggcatgggccactgctgtggtctctgctgacattcttattttgtccgttcattgtagtcctcattttctttggttctttgtgtttttctttaggtctttgagcatattcaagacagctattttaaagtctttgtctagtaggtccaatatacatgctttctagggatattatctggagatttacattttcctttgattggaccatgttttactgcttctttgtgtaccctatgattttttgttggcacttaaatacttgaataaacagccacctctctcagcttttgcagagaggcaaaaagagataaccagaagctgagctgctgcctcctctagaacatgaccatgctgagccaaggacggagtggggcaggggtaacgaaaaatgccatacaatttcctacatttttaaggtgaattttttattaggtatttacgtggttgttgtagacctttgttttccagagctactctaagatttgttcagcaattttctggtcattttatgatagttccatggggaaatgaggaattgaaacttcctagtctgccattttgctgatgtcaatcctttgaggaagttttgactagttaagactatcactttgaaaaaccaaaagcaaacaatagatcaagcaaaattagcaacacacttagaccaaagctaatttcggtaatgtccataaaacctcttacaaatccataataaaaatataaaaatcaagtaaatgacataaacagctaatttaaagaaaaagaaatgctacttttttttgatgactttaaagtatacactcacctcttaaacagtcctatttctagataaagaataagactaggcattctatacatgctgtaaactatattagaggtttctttttgagttttggatttacctattttatcaacaaatatttatgatagtaaggcttccctctccccagttctttccacttttacttcctactttttagggaccagctctcatattcttattataagatcatcccatgatacagataaaggttactcttaggtgaaaagcaagaggcatgttcaaaagcaacagcatcccttccaactctgggctttcttttaatttctcctgttgatttaaaatttgcattataaaatggaggtcaatttgcatgatcataaactctccaataaccaattcaatcggattatggtaagttatggcttgcttttgatacttcagacttccttctgtgatcacttagaagttttgtcagacatttgtgtttccatttattagaagcctagtggatttaattaggatattttaaatggaggatgatagtgaagttgtatctataattttacttttgattttaataaataaatattgaattcagggcctagggactgaacagccgtgtcataacattgttaataaaggagagaccccattcacctaaatccatttcatagatttataagaaacaacaagatgttaccacttttctatttttgcttgtgttgcgtgggtttttggtgtcatatccaaaaaaatcactggccaaggccaatgtcaagaagctttttcctctgtgtttcttctaagagttttacagtttcacatctcatgtttaggtatttaaactaatttgagtggattttttgtgtatggtgtaagacagggttcaattttattcttttgcatatggatactgagctttccaacaccatttactggagagactatcctgtcctctgttgtgtgttcttggcagccctgtcaaagaacttgaccatctatgcatgggtttatttatgggctctctagtctgttccattagtctgtttttaagccagtaccatactgtctcgattactgtagccttgtcacatactttgaaatcaggacattttatgccttcagctttgttcttgctcaagattgctttggctatttggggtcttttgtggtttcaaatacattttaggaaaattttctatttctataaaaatgccattgagattttgatagagattatgtttgaatgtgtaggccactttgagtagtatggacattttaataatattaattcttctaatccatgaacacaggatgtctttacatttacttgtgtctgttttaatgtcttccatcaatgttttatagttttcagtgttcaagtctttcacttctttaagttttttcttaagtattttattcttttcaatgctattgccttcacaatagctaaaacatggaagcaacctatatgcccattgatggatgaatggataaagaaaatatggcatacacatacaatggaatattattctaccttacaaaaggaagttctgccatttgtgacgacatggatgaacccagagaatgttacgctgagtgaaataagccagatgcagaaggacagaaggatgctacatgatatcatttatatgatgaatctggaatagtcaaactcatagaaggagggagtgacatggtggctgtcaggggctgggaggaggcataaacagagaggtattagtcaaagggcaccaagtccagcttatacaatatgagtaagccctagagatctactgtacagtttagtgcctatagttaacaatgctgtattatatatttaaaaatttgccaaaaaggtaatttcatgttgtgatatatcacaaaaataataataaatgaatagaataaagggaaacttttggaagtgatggatatgtttatggtatggattgtggtgatggtttcacagaagtatacttgtcttcaagctcatcaagttatatatattaaatattcacagctttttgtatatcgatcatacctcgatagagtggcttaaaatgaaggaataaaacagtgcatatctcatgacattaaaaaaaaagtatcactttcaactaccttgtaaaattacaaaaaatacaataaataaataaaagtttaggttaggctgggcgcggtggctcacgcctgtaatcccagcactttgagaggccgaggtgagtggatcacaagatcaggagatcgagaccaccttggctaacatggtgaaaccccgtttctactaaaaatacaaaaattggccaggtgtggtggcagggacctgtagtgccagctactcaggaggctgaggcaggaattgtttgaaccgggaaggcagaggttgcagtgagctgagatcgtgccagtgcactccagcctgagagacagagtgagactccacctcaaaaaaaaaaaaaaaaaaaaaaaaaaagtttagattaaaccagaagctctctgtggcaaacattggtttctttttcagaggggaaattcaacttcaatactgctcagtggacatgagcgagagtagggagagggacatttgttattttctctcttaaagttgttgctggggtctttggttgagcctagttcaaactagcgaaagctcagtgagcagaaatagaagtgacactggtaagaggaactgtatcttcactttagagaaaggattcagaaagaaaagaaatgcttcctagaatttcagccaatacagatcagaaccatgtcctttctgaatgggggctgtgaagggaccagttgagtgcagttcacaatgactgtctatctggtgctctcagggaatttaaccatttgtttaggttcataatatattcatcgcattacatacccatgagaagtttgaatgatgaaaaggtctagccttactttggcttcctgccaacccagagaacattggttggtccaatctccttgttcctattcttaaaaagtaaactgatactaatggcacaatatatgttatttgggtgatgaataccctaaagaccctgactccatcactatgcaatctacgcatggaacaaaatggcactagtactcccataaatctatacaaataaaaaagtaaactgaggcacaatacagttttacagtgcttctgaaccagcaatgattcatgaaccagaagtggttggggagctccaccaagggaacacaagagaaggctttttcaggacagagacagaagtagagcaaagacagcgcttgactgtttacagttatacagctaccttatttggtctatctcattggaaagtccttagttatataagtttgttggctgcttctgattggttgtgtttacgttttctttaatataggcatttacaagatatagtgctcaagttattatgtttgcgtatgtcacttatgtttgcagatcaagcaaggtcgaggtcgcttatgagcccttgctggtttggtatgttcatggattcttctggcctggtctccattttaatgtactttaacaccatgaataaaggtttacttctgagactctaagagcccgtttaaattaaacctatgcatgatattgcctcaaatacccaacagctcactcataattggatattcattgctggcacaaatgttaagtattactgagcaattagttctctctatatttggccctcacagagtgtaattattgtattgttcagtactaatctgccttttcacatacatgcattgagaggagagtcttctgtttgccccacaatttcaattctctatatttgtggttagaaactgcggtgacacaatcctcatgtctaaattcattcattcgggagattgtaaagatggttccgtaaagcctcagtattgtaggtgctgataatgatgataatgaaaatgataaactttcccttataaatcttataatgaattgactagactgcctacagactatacactatctttgtctataggtaaaatggttgtaattggccgggcgcagtggctcacgcctgtaatcacagcactttgggaggccaaggtgggtggatcacgaggtaaggagatcgagaccatcctggctaacacggtgaaacctcgtctctaccaaaaatacaaaaaattagccgggcgtcgtggcacgtgcctgtagtcccagctagctactctggaggctgaggcaggagaattacttgaacccggtaggcggagcttgcagtgagctgagatcgcgccactgaattacagcctgggtgacagagcaagactctgtctcaggaaaaaaaagattaaaaaaaataaaaacggctgttttattaagaattgttattaggaacgggcagagaagaacagtgtctgtgtagttcagcatgtgagtggtaatttgctaattatatctggcttgtcactccggtctctgtaacttgctgtgttttgtcaagtgattcttccagaaattttgtgtatattatcttactaaactctcattaaagaggcccctcaaatggaagaagggaacttagagtttttagaatgtgaataaatttaagggactttggcttctagaattctgtagatctctgttttgctgggaatatacagcttcccattattctgagattggctgatctgtaatgctgtgaaatatcagtgtttactaaatttgttattttacatttatgggcatacatttttttttaattctctctctctctttttttgagacagggtctccctctgttacccaggctggagtgcagtggcgcactcatgactcaatgcaaacttgaatttgcctggactcaagtgatcctcccacctcagcctcccaagtagctgagactataggcatgcaccaacatgcccagctaatttttgtaatttttgtagagatggagttttaccacgttgcccaggttggtcttgaactcctaggctcaagcaatctcctaaagtgttgggattacaggcatgatccactgctcccagccttaattcttttaaaaaggggaaaaatgaggtttttcactattgctccaatcaccatcatagctaaataagttaatgcacatagttaagaaatgtacagtagagagaaaacaatctgtgttgtatttagaaactagcaagaattaaggactaataatatctgaatatgaactggtattaagcccaaactactgcatcaggagaccatcaataaaatttatttatcgagagccattcattagtcaaccaaagtcgtgggaaatttaatctgtataaggagtcataaggcataagggataggtatgaaggattgttgagatgatgtgttttatttcgctaataatgcatatgacaccattccaatttttttaaatttaaaacaacaatcatttatttgcttgcttctcaagcctgggtaatcgtgtttggcaatgagaccttgttgcatgcttgctaatatcccactggtcaaagctagtcaaatggccaagcctagagtcagcgtgggagaaggccacacaagggtttgaattctgaggacgagtctctttcattgaaggccaaagaaacagtctacctcagagggttgctggggagctataatgcaaagaataaacctcaccctgccttcaaggcgctcacagagaagaaatcttttgaatattagtgaagttttcctggacatcccaatggatagatgtgagggacagtcacgtactcaggacatctgtttgcttatggtgttatgttacagatgtcacaaatgaaaatcagagacatgtagccctgagcccagtaactataaagcggtctagctgaagctggagcccacaagagggcactttgcaccatgatgcacgcttgtttcttgccatcagctctgcaatgagttcaagctaatgccatgtcccagccgtccagttgttttatgacttgtgtgattgaagcatatggtggcttgtggcatgttcttaggcaaaccactcacctccctaggtttcgttttcctaatttctcaaacaagggagttagattaggtggtctatagttccttccaattgtgatatttcactatataacaatatagttataatagatcatagcacatctgtaatgaaaaaaagtgagttcatttcttaacaagtacatttacttaactagttggagtcattaaagcaaattaagaacgaaattcttagttaatctgaacttttctgggcatactgatctgttccctaacgcgtctgaccgtggaaaagtggatcagcaggagtgggactggctctcagctttgccatgtttggctctttctctgctgtgaaactcagtttcttcctggatcaagaggttaatttctgccggtgttattttacagtgttgcaaagagataaaagccagacgaaagaagggaaagtacttcagctttgattagggatttttttttctgtccctgtgaccatacactactcaattctgacagcttcgcatgagtctagcagaaaattgagggattcactgttattccttaacttgcagaggtccagacccgcccacatcaaatggtgaggtccccactttcaactttagctgttgctaaatctgtgaccctttcaatgaaatccaaggatctcagcttaaaaaaagttaaaataaaataaaaactaggtgtttttcagaggcggtttgaaacgcctctctgaggttgtcagagattgtttttgttttctccctttgcccttcttggaatgcaccaaacataaaagcattttttttcaagctttactttcactttcgagagtgccgtctatttgccacacacttccctgatgaaatgtctggatttggactaaagaaaaaaggaaaggctagcagtcatccaagtaagtgaaggtgttcatttcacgttcttactgggcagggtctctcttgctgagtagagtttgctagcagaatgcatgtggttttagccttctttggtctttctttgatctggtgcttgaaatctagtcagaattattcaggaaggaaagtggaagaaaagggatatgatatgggcatgggagaagggtataactcagaacacaagtaatagcaccaatatctagttaatgtgataatgtatttatgcagtatttaatttttttctctgtagcattctgtacctggaaaaaacacattagggaagctatggaaatcattttgcaacagtctttttagcaaatcacatctttgccttaaagaaacaaaactccaagaggttaaaagagcgtatccccttttgttagttttattggctggaggggagacaggagctggcattgtatgacaatgtcttagataggagagaacattcaggtatgcctaggagtaagtaaatggctttctttcacctaatgaaggataatggaagaagtggagaagtggaaagttgttaaggtgtatgggaagatcagaaactggtatcggcaattgtggggtactcgggtaaaaatggagttggcttcagcaagttgattcccaggtttacagatgattacgtgctggtatgtgtcttcatatgggcgtgcctgtgtatgaacctactacaaaggttgcaaagtttacaaatcaaactatggatagtggttaactccaggtagtctgcctccagaccccatgtcctaaccatcaggcaatattgtctctcacttggacaaagaatgtgaattccatgtgccctcacaaaatatttccaaaattctaaggctgagtgagtctctttttaattttttttcattttctttatttctgctagatctcattcaacagcaacgttttcttcactctcatttcatcctttaactgcatttttgcttgttttactgaagcatgtcctagaataaccttttcatacagatcgtatggctataaacttactgaatttttgcatatctcaaaatacttatacctttttatttagttattcagatggatgtgaaatttccctatcttattttattttattttatttcattttatttcatttatcgatttagagacaaggtctcgctgtgttgcccaggctgaagtacagtggcatgatcgtggctcactgcagccttgacctccctggctcaagcaattctcacacctcagtgtcacgagtagctgggaccacaggtgtgaaccactatggccagctaatttaaaaaaaaattttggtggagatgaggtttccctgtgttgcccaggctggtcccaaactcctaggctcaagggatcctccagcctcagcttcctaaagtgatgggattacaggcatgagccacaggtaattttcttggcctggtcaaaggtaattttcttgttttttagaggtaaggtcttgctctgttgcccaggctggagtgcagtggtgtgatcatgattcattgcagccttaacctcctgggctcaagcgatcctcctgcctcagcctcccaagtagctggaactacaggcttgtgccaccacacttggctactttctaaaatatttttgtagatacggggtctcactatgttgcccaggctggtgttgagctcctgatctccttctgcctacaccttctaaagtgccgggattgtggggatgagccactatgctttgcctggatatgaaattttaaattcaaaataattttctctaaatgtttggaaagcttatctctattgttttccagtggttcatgttactgatgaaaagttttttattaatcaagatctcttttctttggaaatgaaggttttaggatttttgtgtgcatggttgcaattctgaaatttcataggagtctctccaagtttgttcctctttcactcctcctgcctagcatttggtgagttttgcccactgatgaaatgtcttcagatggggcaagtccttaagtcattcagggatatgctttgtaatggattagtccttctcagcaattctgacctatagcaggagccctaccagaggggtacatctcacctaagcaaggagaatgtattgtagggaccttacctatgagttggtaaatagagataggaagttctgaaggaactggaagagaggtttgggacactctcagagagggggcaggtggggagctggtccccagcatttgagaggtatcattgccagccctgcatccttcacgtgcctgggcaagtcagcaaatgcatccttgctggcctagctgtggcattcctcatggcctgtggatataaagaatgtgcacagctttacaatgattagtgccagagttgtaaaggccatgagatgggaatattagtttatggaagccagttttttttgttgttttttctgtttctgagaactaaattagaatattagtaaaatcgctatttttaagtatattagaacaattctatatactcacattagttctgttttcctaggattagtcacctaaggtgattttattacctgacacttacctggaataattttcatgtcatgacttttagatcttgtggaatatctatttagatatcattaccactgcttcatctccataccttgtgggtgtatttgattttttaaaatatctgaaatttggttgttgatcacaccacagagtatcacactgggtacacatcccaccaaaataaagtgtgacaatgtatggagttgagtggctttcctgagctgactaaatgcccatggaaagctattgtatgagtgcattctcacattgctctacagaaatacctgagactggtcatttataaagaaagaggttcaattggctgatggttctgcaagtggtgcaggcagcatagcagcctctgcttctggaggagcctcaaggagctttcacccaccacagaaggcaaagccagagctggcaccttcacatagccggagcaggaagaagagagaaggggaaggtgccacacacttttatttttttattatttattttggggggagtgggggcgaagtctcactttgtcacccaggctggagtgcatgtggtgggatctcggctcactgcagcctccgcttccctagttcaagcgattctcctgcctcggccttcccagtagctgggattacaggcacccaccaccacacccagctaatttttgtatttagtagagacacggttacaccatgttggccaggctggtctcaaactcctgacctcaggtgatctgcccaccttggcctcccaagtgctggggttacaggcgtgagccactgcgcccaaccaccacacacttttaaacgaccgaatctcataagaattcactcactcactatcgggagaacagcaccgagggggtggtgctgaaccatctgtgagaactctgccccatgagccagtcacctcccaccagcccccacctccaacactgggaattacaattcaacgtgtggtgtgggtggagacgcagaggcaaaccatatcggctatgtattcaacatatatttatttcttcagagccaacaaagtgccaggtcttgttctaggcacagacaacaccgtatggaataagaactatgtcctctactattatagcttcacattctagtgagaagcaataattaataataaataatacacaatattggataatttccatcaaccatagcaacggaaaaggcaatctagaagaagagcaagatgggaggtttcgctcactgaacttcaagacttgttgtaaagctaaagtaatccgaacaatgtggtattggcctaagaactaacaaatatttcagtggaagagagtagacagcccagaaatagaccctcgcttaaaacatttactcggtttctaaggaaagcacagaacaatccggtgggggaaagaagtctctttaaaaaatggtctgactggaccaggcgtggtggctcacccctataatcccagcactttgggaggccgaggtggatggattacctgaggtcaggagttcaagaccagcctggccaacatggtgaaaccctgtctctactacaaatataaaaattagccaggcatggtggcgcgtgcctgtagtcccagctactcgggagcctgaggcaggagaatcacttgaacccaggaggtggagactgcagtgagccaagatggcaccactgcactccagcctgggtgacagagtgagactccatctcaaaaaaaaaacaaaaaacaagatctgactgactggatatacacacaaaaaaccatgactcctacttcatgcatacacaacaattaacttaggagaggtcacacaccttcacatagaagctaacaccataaagctttttagaggagagtatctaagtaatgggagtaggaaaatttcttagaggagacacagaaatgataaaaataaaagagaagatgataaactagatttcatcataattaagaagacatcagtaagaaaataaataggcaactcacacactgggaataaatatttacaaaataggaatctgacgaaggactgacactcagatacataaaaaattcctacaacacaataataaacaggaaacaatctaatagatgagcaaaatatttgaacatataagggaagataaatgaacaataagcacatgaaaattgttaaatatcgttagtcggcagggaaatgcaaatgaaaaccataattagctatcactatatgttcagcagaatgattaaaaataataataaaaataggtaccaaatgttgtcaggaaagttggtggtgcaacactttcccaaaggatctggcagtttcctgtaaaaccaaatggcctcaccaaatggcccaggcattccaatcctagttatttaccccaaagaaatagaacacagtcatgtggcacttaatcatggggatatgttctgagaaatgcatcgtgaggggacttcatccttgtgggaacgtcacagggagtgcttacacagaactaggtagtacagcctgtggcgcccagcctgcaaaaccagacagccggcgtgtgactgcactgaatactggaggcaattgtaacacaatgggaagtacttgtgtatctaaacatagaaaaggtaagtgaaaatgtggtacaaaaggttacaaatggcacttccatagggcacttaccacgagtggagcttgcagtactgggagtggctctgggtgagtctgtgagtgagaagggaagtggatgtggaggcctcggacatgactgtgcaccactgcagactttatgaacactgcacacttaggttatactaaacctatttaaaaattttactttcttcagtaataattaacttattataactgttttactttataagagttttaatttttcaaaactttttgactcgtgtaataatgcttggtttaaaacaagcacattgtacacctatacaaaaatattttctttgtattcttattttataagcttttttctatttttaattttcttctttttttttaactttttaaacgtttttgttaaaaacgaagacacaaacacacacattagcctaggcctgctcagagtcaggatcattaatgtcactgccttccaccacgtcgtgtcccactggaagctctttaggggccacaacacgcacggacctgtcatctcttatgacaacagtgccttcttctggaatccctcttgaaggacctgcctgaggctgttttacagttaacttaaaaaaaaattagtagaaggagtacactctaaaattatgataaaaagaatagtatagtaaatacataaatcagtaacattcatttattatcattatcaactattaggtactgtaaataattatgtgtgctatattttatataactagtagtgcagtaggtttgtttacaccagcatcactacaaacatgtgaggaatgcattgcaccatgatattatgacggctagattagtaggtgataagaatttttcagttccattatgatctgcagtgactatttatttatatgattgtaaaattgtgattgaggctgggcacattggctcatgcctgtaatcccagcattttaggaggccaaggctggaggatcacttgatgtcaaaagtttgagaccagcctgggcaacatagcaagaccctatctctctataaaatttaaaaaataataaaaaattagccgggtgtggtacatgcctgtagtcccagctacttgggaggctgaggtggaaggaacccttgagcccgagagttggaagctgcagtgagccatgatagtaccactgtactccagcctgggtgacagagtgagaccctgtctctaaaaataaataaataaatacaaataatttttaaaattgtaaataatatttactgactttagatttgctgaattaatgtaggccaaggacctcatatgtaatcatagtttcagggtaaaatgctaacatttcacatcttgacaatgtcaagcaatgttatagctgacagttttaggaaatgtaagaaaggaagaaatgtgaagaaaaatgtatttatttatttaaaataaaataaaaattaactggctgggcacggtggctcacgcctgtaatcccagcactttgggaggctgaagtgggcagatcatgaagtcaagagatcgagaccatcctggccaacatggtgaaacctcgtctctactaaaaatataaaaattagccaggtgtggtggcgggtgcctgtaatcccagctactcgggaggctgaggcaggagaatcacttgaacccagaaggtgaaggttgcagtgagccgagattgcaccattgcactccagcctggtgacagagccagattccatctcaaaaacaaaacagaacaaaataaaacgaaacaaaaacaaacaaaattaactaaagaaaagttgtgaatagaatgagagaaaaatataattaaattccttatctttatagtgaaatgagtaaatgaagaaatagaagatcaagaatattaagtttatggaggtaatcatgagaattacagatagaacctatcaaaagagagacattgcagctgcaactggcattaaggtgaaggataggaaggaagtttggatgttttattttttacctttctgtactgtttgacatttttccgtttgatgtatgacttgtataatatgtacttgtatggcataaaactatgagtaataacatcatacatggtcatattttggtgatatattttacaaggaatataccaatgcatttgaaagccatctgctattaatgttgctcatactttttaatgtttcttttctacagcagaatcatgagacagactttgccttgtatctacttttgggggggccttttgccctttgggatgctgtgtgcatcctccaccaccaagtgcactgttagccatgaagttgctgactgcagccacctgaagttgactcaggtacccgatgatctacccacaaacataacagtgttgaaccttacccataatcaactcagaagattaccagccgccaacttcacaaggtatagccagctaactagcttggatgtaggatttaacaccatctcaaaactggagccagaattgtgccagaaacttcccatgttaaaagttttgaacctccagcacaatgagctatctcaactttctgataaaacctttgccttctgcacgaatttgactgaactccatctcatgtccaactcaatccagaaaattaaaaataatccctttgtcaagcagaaggtaagttgaaaatgtctattgttactaatgtttttaagtcagttacccatccttagacttactatctaaatatcaaggaaataaagaggaagaaatttgatctaatccaatttgccacaaatattgccattataatagaaaatgcttccaaaagagaaaatatactcttaaatcagtttcatccttaattttcaatgtttgcctctctcgctttctcccattagaaatagaacttagacgcaagagatagaagtaatgaacagagaagaatcagaatatcccctaagaacatggaaactaaactttcaatgctgctgatttagcatgtgaagtcgtgacaaaagtcttgagtccaaattctgacttaaataaaattaacaaattgatacaatgatcaagtgaattgttcaactaaaaattacctactcctggtttcagaaatctcctcagtggctatttcaatgactttttcaatagtggtgtcactttttcaatgattcctttttcttttcaaaactttgctcgaattttagttttttttcttttctttttagttgatgtttaataattgcacatatttatgagatagagaatgatttttcagtatgtgtatataatgtgtaatgattaaatcagggtaattatcatatccatcatctcaaatgtttctcatttgtgttgtgaacattcaaaatacgctcttctagcttttaaaaaatacacaataaatcgtagttaaccatattcaccctacaatgctttagagcaccagaaaaaaaaaaacgcatgttattgtttctaaatctgaggcaattattaagtgcttttctttaaccaaagcgattttcaagttacttcattttatggccttataaaaaattgaacattgctcttcctcagatgccaagaataatgtacaaatgtaaatatgctgtgaaacataaagtgatttgctccctagctattttaaatcttttcttgggtcttcttagagtctaatgtggatgaaatatctttgaatacaaaggcctcaaaatctggctagagaaatcattgcaaaatgttatttttgtaaagacttaaattaaaaaacctgcttctcgttaacagcgattacattagactttgccttaactggtatcgctttcccttaccttttgcctgaatttgaagcatacatattcaaaaatagcaaagggtgataaaaacatcccacagtactgataaagcaaacaaaacttaatattctgtactagtcatgactcaaaatttatataatatgaccctttctcagtataaaaatctatttaaaatttcatagatggcaaaattctcatgctttttaagaaaacattctgttcttttttctgatacttattttcaaggttaaagcatgacactgtgtgtttgataagccatgtgaaaatttcttgcatcataagtaaaaggttatgataaataagttcataaattagcaatgttccttatatcataaataagcttaagtcttttttattttggtaagagaaataaaatgattcttgaagtaagaaataaaatccttcctacaatggttgcaagggtgaccatcacaaagattataacgtaacaaagattaatcagatcaaagattttttattatgcttactgttagtattctacagaataatagagaggtgttgattttgctgttgaagtatttttcagatgtacttacatttaaaagaactgtttttgacagcaagactctaacatatgcatattattttttcccttcagaatttaatcacattagatctgtctcataatggcttgtcatctacaaaattaggaactcaggttcagctggaaaatctccaagagcttctattatcaaacaataaaattcaagcgctaaaaagtgaagaactggatatctttgccaattcatctttaaaaaaattagagttgtcatcgaatcaaattaaagaggtaagaagtaaggtaaaattattttgcattctgcctttaaggtggatagtccctatctgtgtcacatacacaggaatgtaatgctctctagcctctgcctgtcttccagcaatccttcccacctactgcttgggggcattggtgtcatcctcctgagagctcaggcagccccaggagaggtcgggagacgggactctgccgccctgcagcactgggtggaacccctgtgccgtgaccttgcgaacatccttaacatctctgagtctgtgtcctcacttataaagtggaaatagtgctctctcacacaaactctctgacagagttattaattaaagagtacgatggtcaagagccccaggttcacagtcgggttagctggcttggtctctgggctttgtcttttaacaatcatgttatcaggcaagttattcaagttctccctctctagcctcccagctttcaaatgggcgtgataatgactctgcttcataggactgtgtggtaaagaatttaggaccgtgtctggcgtaggcagtgctcaggaaatgatcagcagcagtatgtggttataaaaaccttcctataatgaagtcagcttaaataactgacaggactgtctctttttggaatcatgatcttcaagctaatcattttctgtcacgggagagcaacaactatctggaccggtggcacaggggtaaaagaatttaccaagacagttgcaggtggagaaaggcacatttattcgtgaaagtaggaaactacattgcgagaaggcaacgggcatatcagcaagagaagctgactgcaaagaaacaaaggcttgctggggattttacagggtcttgtttatgctgtgtgctgaagagggctttgagctgcactgacagcgcccaggttgcagtgggctaactcgcaggggcctggtgatagctgggcacaggaagattgtcagttatttgcacaggagggctacgtgtcctggatcatgaagacagactaataatttacctgctcttttgctttctctcggtcccgccaactgactacttttccctaaataggactctgcattttcacatacaggtttgtctgtattttacactcattttgttccaggctataagactactggaaatccttaattacaactctattttttttttcagacataaaaataaatggcgtacaaatttatcctaagatattaagatgttttgtgcaagctcttcattttattttttaaactgcatttttctatgattaagacatttattgtagtaatcttattaaatatatgaataaatgagaaaataataataaggggtgattttaaaaaatcactcaaatgtccatagtcagaaacaaccactgttagcatttgggtatatttatccctggcttttctccaaataattataaggaaaaacgatagcttaaattcttactgtactgaaattcacactgttaaggcacttaactgtgtgtcaagtgctgtgataaatttttaaaaatattttatgtatatagtatttttaatcaatattttattttattttattttattttattttttgagactgagtttcactctttgttgcccaggctggagtgcagtggcacaatctggactcactgcaacctccgactcccgggttcaagcgattctcctgtctcagcctcccgagtagctgggattacaagtgcctgccaccacccctggctaatttttggatttttagtagagacaggatttcaccgtgttggccaggctggtctcgaactcctgacttcatgatccacctccacctcggcctcccaaagtgctgggattacaggcgtgagccaccgcgcccagcctggagggggctctgatttgtaatgtgtcacttgggggacagtagggctaatgcaaaaaaagagagaagtatagaagaaagggtgctttatcataaacaaatgagttaaaatgcaaagcagaaaattatgaaattaagtatgataaatctgcatgatagcattattttacaggcattaaaattaagctttggaatgcttcttaattgtatgggagatgttcataatatgatattaaatctaaagagcaggagacatcaatcttagctactcaggaggctgaggcaagagaatcgcttgaacccaggaggcaagggttgcagggagctgagatcgcaccactgcactccaccctgggggacagagcgaaactctgtctcaaaaaaaaaaaaaaagaaaaagaaatcagagccctttactcctctggcggtttcgactgcctgccggaactggcctccattctctctggattcctcctctcccacctgctgttctcttgtccccgaagtgagtcccagaacagccaaggctctggtaagggtgtaggacggagcagaagggagctggaaaaacacgatagtaaaagaaagtcaggagaaaatccgggtggaaagacgagagggagagctagagctcagagttccagaaaggaaagtgtgccgtcaccgcctcatcataaaagccatccacaacttccttccatgaggctcactgagaacagcggcaccaagacacaaccaggaactgccccaggagtgacttcacgagcagtttattcattgcaattgttctcatggtgataaagaaaaagtaccaggagatggatcctggactggaaggtcagagaagcctccctgaaaaggtggcatctaagctgaggctgtgaatgctgagcagaagttagcccgtggccaggggaggtcagaggctggagtaagaggtgggcgctgcaggaaccgagtaaggaaggactcgtgcattacaggaagggggagaaatgctctgcccatgggatgtggtgaagggtgagcggagatggagtaaagaactgcatctggccgggtgcagcggctcaggcctataatcccagcactttgggaggctgaggcgggcggatcatgaggtcaggagttcaagaccagcctggcctacacggtgaaaccccgactctactaaaaatacaaaacttagctggacgtggtggcgcatgcctgtaatcccagctactcgggaggctgaggcaggagaattgcttgaactgaggaggtggagtttgcagtgagctgagattgcactgctgtactccagcctgggcgacagagcgagactccgtctcaaaaaaaaaaaaaaaaaaaaaaaaaaaggctttcaacagcattacagagtctgtgttcttttgattgttaacctctttttttttcctacctttagttttctccagggtgttttcacgcaattggaagattatttggcctctttctgaacaatgtccagctgggtcccagccttacagagaagctatgtttggaattagcaaacacaagcattcggaatctgtctctgagtaacagccagctgtccaccaccagcaatacaactttcttgggactaaagtggacaaatctcactatgctcgatctttcctacaacaacttaaatgtggttggtaacgattcctttgcttggcttccacaactagaatatttcttcctagagtataataatatacagcatttgttttctcactctttgcacgggcttttcaatgtgaggtacctgaatttgaaacggtcttttactaaacaaagtatttcccttgcctcactccccaagattgatgatttttcttttcagtggctaaaatgtttggagcaccttaacatggaagataatgatattccaggcataaaaagcaatatgttcacaggattgataaacctgaaatacttaagtctatccaactcctttacaagtttgcgaactttgacaaatgaaacatttgtatcacttgctcattctcccttacacatactcaacctaaccaagaataaaatctcaaaaatagagagtgatgctttctcttggttgggccacctagaagtacttgacctgggccttaatgaaattgggcaagaactcacaggccaggaatggagaggtctagaaaatattttcgaaatctatctttcctacaacaagtacctgcagctgactaggaactcctttgccttggtcccaagccttcaacgactgatgctccgaagggtggcccttaaaaatgtggatagctctccttcaccattccagcctcttcgtaacttgaccattctggatctaagcaacaacaacatagccaacataaatgatgacatgttggagggtcttgagaaactagaaattctcgatttgcagcataacaacttagcacggctctggaaacacgcaaaccctggtggtcccatttatttcctaaagggtctgtctcacctccacatccttaacttggagtccaacggctttgacgagatcccagttgaggtcttcaaggatttatttgaactaaagatcatcgatttaggattgaataatttaaacacacttccagcatctgtctttaataatcaggtgtctctaaagtcattgaaccttcagaagaatctcataacatccgttgagaagaaggttttcgggccagctttcaggaacctgactgagttagatatgcgctttaatccctttgattgcacgtgtgaaagtattgcctggtttgttaattggattaacgagacccataccaacatccctgagctgtcaagccactacctttgcaacactccacctcactatcatgggttcccagtgagactttttgatacatcatcttgcaaagacagtgccccctttgaactctttttcatgatcaataccagtatcctgttgatttttatctttattgtacttctcatccactttgagggctggaggatatctttttattggaatgtttcagtacatcgagttcttggtttcaaagaaatagacagacagacagaacagtttgaatatgcagcatatataattcatgcctataaagataaggattgggtctgggaacatttctcttcaatggaaaaggaagaccaatctctcaaattttgtctggaagaaagggactttgaggcgggtgtttttgaactagaagcaattgttaacagcatcaaaagaagcagaaaaattatttttgttataacacaccatctattaaaagacccattatgcaaaaggtaggtaaacattgtgaaattttaagtgtgtacttgcttttcaattaaatttctttttttttttttgagatggagtcctgctctgttgcccaggctggagtgcagtggtgtgatctcagcttactgcagcctccacctcctgggttcaagtaattctcctgcctcagcctctcaagtagttgggattacaggcacgcgccaccaagcctggctaatttttgtatttttattagagatggggtttcaccgtgttggccaggcttatcttgaactcctggcctcaggtgagcttcaattaaacttttaaatattaccaatattactcacaactcaaagaatttttaaaataaaattaagaaaaaaaaaacctgagtttcagtaacagtttaaactctacagagtatttttaaatagtattgcttctggctgttaaaaaccgtatattaattcttcaatacatttttttacttagattcaaggtacatcatgcagttcaacaagctattgaacaaaatctggattccattatattggttttccttgaggagattccagattataaactgaaccatgcactctgtttgcgaagaggaatgtttaaatctcactgcatcttgaactggccagttcagaaagaacggataggtgcctttcgtcataaattgcaagtagcacttggatccaaaaactctgtacattaaatttatttaaatattcaattagcaaaggagaaactttctcaatttaaaaagttctatggcaaatttaagttttccataaaggtgttataatttgtttattcatatttgtaaatgattatattctatcacaattacatctcttctaggaaaatgtgtctccttatttcaggcctatttttgacaattgacttaattttacccaaaataaaacatataagcacgtaagaacattgtctactgattaatatacaatcagccactgagcctatgacagcttaaggagtttgaaaacattcctcattttaagaaaagttagaggtatatgagggtttgtgatgatctttttgtattttggatgcacttagaatgaaagataattgtttcaatgggtataatgctatttcctttgtaaaagagtaaaatatatacccatatttttaacaagtttaattacagtattttttcaatggaaaaactttgtattttagtaagtacttgtctcagtgttgactttgttaaatgttaaatattttttaatatacatacccaagggcagaaaacatttgcaattcatttttattagttaatgagatgattatttgaatgaatattgacttgtattttcctgagattatgagtttctgctgtgggagggtggaaacaattctcttactaaaagtattgtaggcaggcttgctttctgaaggctaatcactatttggctttgtggaaacagaactttcctcccatggtcacagactcaggagatggcgttggcaaaatcacttggtcccactgggattctttgactcctgatcttgaaaattatgataataaatgcatcttagatattcctatgtaattagtgatgatgatcgctgtataatatattcaaaggaatgtattattttaccataaaataatgtgctacgcataaggtagtccttatctagaaagactatttttatttttgtttttttgtttgtttgttttttatttgtttgtttttgagacagagtctggctctgtcgcccaggctggagttcagtggtccaacctcggcccaccgcaacctccacctctgagttcaagctattctcctgcctcagccacccgagtagctgggattacaggcacatgccaccatgcctggctaatttttgtatttttagtagagatggggtttcaccatgttggccaggctggtcttgaactcctgacctcaagtgatcctctcgccttggcctcccaaagtgctaggattacaggtgtgagccaccgcgccccgcctttttattttgttttacaatacaacaaaaaatttttagttttacaataaaagagaatctgattattggaaatagacctgaatagctttttgaaatatttatagttctagtatttaaagagaaacctgaaattataaagctgagttaatttctatacctgaaatgttcatttgtctgctgaattcagggagcatttgagatgtcacattttggaactttgatttaaatagttcagtattcccaaggctgagttccatgaccctggaatgagaaatatccactgtacctctggttctgaagagtctatagtcggccaacactgtgaatgtgtggaggactaattgtcactttcatgttatttgccaccctgacagctgagacactgcttttcagcattttagttaagatttgctttttaactgtgcaataatcattttattttggcattataaaataaaaatcacaacttctgcttttcttatatgctttgtgtgttatcacacaaatattctcaaatattcataagatattttaaataaatcattgtgaattagtcaatatatcaagttgcttaatatgtcatatatcaatgctatttaatatataatatctatatttaatatattgatatgttactggtggagagtgtccaggttcttggtgctttgaacaaggaattggacaaaatgcacaaagaatgaggcgacaaaagcagaggtttattgaaaacgaaagcacaccccgcagggtgggagcggcccgagcaagcagctcaaaagccgggttacaggattttctggggtttaaatactctctagaggtttccattggttacttggtttatgccctatgtaaatgaagaggctaaagtgaaattacaaagttatttacttgttgtgcaccctacgcaaatgaatagctgtcacagctgaggtagagttacagtgatttacttggtggtagaatgttgggatttttccatttgattgagttctaggaagcctttagtttccctgcctgcagaccccattctcctgcctcagatatatcaatgacatattcaatacatcattaagttgcttaatatttaagaggttaagatgcacaggtaatgacctctaaatgaatgccaataaaaatagtaaaaggtgtaaactctgactcctatctgacctaggtaggaagtaacatccagaacttctgcaggctgtcctgtgtaattgttctccggaggaacccttgtccctggggtttgagagaaggggatcgaggaaaaggatgtttgtctgagctcttgtttgatttgcccaagtgacttgacttgtttgaatcctctcagggtgccatcatgtaatctgtccactccaacttcttcctgtttttcacattgcaaaacaaaacccaactgaatcgacactgagtttaaaataaatcttggtatttaggttgtacctaaaaatgataacttttagactgtaatcagaggtagatgctatcaatttgttagtgaggaggggaggagttttcgatgccacttagtttacaatgtctaattgttcaaatatacatctaggttgtaaaggagactcaacggtaagttatagtgaccattgaaaaatgtaaaggggcttcaaatcaagaacttagaaggaatttcttgcaatctattgagacacaaagcagatgagtggttgtctgggcctaggaacaggaatggggagtggctgcaaataggtggaagagaccttttttgggtgatgaaagtgctctataattgggttatggtaataattgtacaactatgtaaatttactgaaagtcattgagttggacacttaaaacaggtgaattttatgatatgtaaattatatattcacaaagccattaaaaattgtattttttgagcagctacaggtgcctagccctgtgttaactactatggtgaacagtaggatgggatttagaggtgtgggcaatacaagctgggtggaaagggatttccaaagatggacctgggcagggaggactccacagaggagacccagccccttccaaggtgggtgagatttcaatgagtggagaagaagatggcagaatgaacagcaagagagaagttcatgagggagacatgaacttggtgtcgggagatagtggggtgccgaaggggatggaaccaggctgcagagagcatggcagagatgtttagatgcaatgttttgaaattgtgactttatgggtttaaactgccaaacccagacatcatgatgaaattccctcctgggatctatgccttagatttaggtgtcagccagttaaacagaggaacatagactataacttcacagtccaaagccaggctggctctcacataacaaaaggggctttaagcacttttttcccctataaacatatacatctgtgttaaaataacaaaggacaatcactcattagttactaattacactaggtgacatattagccactcttggctcttgcaactctctagccttgctccactgtcctgtttatgggagaaaacagttgtgccatgtggctattttcacaaaccattctttattctttgtgtgcattgggcaagagtcatcagacttttcaatggtggaactcttccacttttgtttgaggacttctgggtagacagggttggcttatttagcttccttttctcttaggtcagttccccaggaaacaggttttgggatggaggtttgcatgaaggaagtttcaggggtgctctgatttataagtgagtgaaataagctggatcgggaagagagagaataattaactctgatgcaattcacaattgcagctgagttcttagccagccccatggggagctctggagctggaatgaccctagagaattgggagaaatctaggcaaaggggctggacccctctccatgccctcacatcaaccagtcacagacacaggcagccccagggaggaagtgtgaccttaagtaaaatgttttgccaaaagaaattcaagggcaggtgcagtggctcaaacctgtaatcccagcactttgggaggtggaggcaggcagatcacctggggttgggagttagagaccagcctcaccaacatggagaaaccccgttctaataaaaatacaaaattagccgggcgtggtggcgtgtgcctgtaatcctagctacttgggaggctgaggcaggagaatgcagtgagccgagattgtgccactgcactccagcctgggcaacaagagcaaaactctgtcaaaaaaaaaaaaaagagagaaagagataaaggaaaggaagaaagaaagaaaggaagaaagaaagaaaaaaaagaaaggaagatgaaagaaagaaagaaaagaaagaaaaattcaaggagaaggccacagttgtgaaccgtcagaagcgaactcactgtgcagctggaggaataagtgcctggatcctgagagcagagctccctgtaaaatggcctttgcaaaaattgttaacagtgagaaagttatgatattgaagggatctgacctaatcaactccatcttgcttctagtcttgtttatttctgggtgcaggcaaactaactttgggaagaacttagttcatagtttaacttcgaaacaaagatggtaacttccctttcccaaaacaaacctccttcttgccagggaaccagactgcctttgtaggaccaacaaattagccacaaggtttataacttccttaattactcctgcagacaacatcactattttagaatgtaagattggcctttcaagatgtcttttcaagtttttgcatttccgataaataacggctcgacccacctgccaacaagttctgtagctccacctaggaaccagctcagtgtaagaggacagctttggctccctatgagttcatctcccacccaaccagtcagcacttcccattccccagcccctacccaccaaactatccttaaaaaaccctagtctcaaggccaggtgtggtggctcatgcctgtaatcccagcactttgggaggctgaggcgggtggatcacttgaggtcaggagttcgagaccagcctgcccaacatggtgaaaccctgtctctactaaaaacacaaaaaaattagcttggtgtggtggtgggctcctgtaatcccagctactcaggaggctgaggcaggagaatcgcttgaacccaggagacggaggttgtagtgagccgagattgtgccactgcactccagcctgggcaacagagcaagactccgtctcagaaaacaaaaacaaaaaaaaaccctagtctaccaattttcggggagactgatttgagtaataaaacaccagtcttctgttcagctgggtctgtatgaattaaacttttctctattgcaaatcccctgtcttgataaattagctctgtctgggcagcagagagatacttgttggtggttacacctgtttcactacaacacccaccacgccttttcaggtacttaagaattaaaagggcaggtgcaatggctcattgtaattccagcattttgggaggccaaggtgagaggattgcttgaggccagaagtttgagaccagcctgggcaacacagcaagactctgtctctacaaaaaatttagaaattagtttgacgaggtggtatgagcctgtagttgcagcaacttgggaagctaagctgggagaattgcccgaggccaggagtttgaggctacagtgagctatgatcatgccactgcactccagcctgggtaacagaatgagaccctataaccacccaatgggtgtatcttgcctgctgcccagatagagctgactggaaaatttaaagaacaatttgatgagggcgggcggtggcacagagaatggggaatgctgattggttggacgagagagaaaatcatgcggagttgaagctgtccttttggactgagtcggctcttgggtgggagccacaagaccaagtgagcccgtttatggatctgcgtggtgccaggagatccatcaactgcagggtctgaaaaatacctcaaacatcaatgttaggttgtataacgctgtgttattcataggagcaattgaggaggctagcgatcttgtggcctctggccgcgtgattccagagccgtcacttctaatcttgtggctgacttgttagttttacaaaggcagtctggtccccaggcaagaagggggtttatcttaggaaagggctaccgtccttgtctaaagtcagttcggcctatgcccaggagtgaacaagggcagcctggaggtcagaagcaagatggagtcggttaggtcaggtctctctcactgtcgtagctttctctctgctataatttttgcaaaggtggtttcaaggctctgcctctaaaattgaaacaagaattaaaatatacagagctcggctggtttgggcactaatgcaagcttccaaagcttcaaacatttttttcttttttaaataaggtctccttcaaaaattctgagaaataaatgacttcatgaagagccaatgttttgtgtttttttaaacaaacaaggatgttttcacagtgttaatgtcctccagtcaaagacaacgaacacacccgcagttaaagaagttggggttgcgtcgttgcagtgaggaaggaaacacaccatggggtatctgagtaagaagggggttgaaaaatcctattatataggatttgggcttaggatgggtaaattcaggaagaggagactagaacagggataaagctgtaaaagaaacagcgatcactggccagatgtggtggttcatgcctgtaatcccagcactttgggaggccaaggtgggtggatcacttgaggtcaggagttggagaccagcctggccaacatagtaaaaacccatctctactaaaaataaaaaattagccgggcgtagtggcacgtgcctgtaatcccagctactcgggaggctgaggcaggagaatcgcttgaacctgggaggtggaggttgcagtgagccgagatcacgccattgcgctccagcttgggcaacaagagcagaaatccgtctcaaaaaaaaaaagaaagaaagaaagaaaaaaaagaaaagaaagaaagaaacagcaatcactgagctgagagaggagtgtttacggtattttgagggtggcacagtgaccttatttttgtctggactcagacaaaattatgacgtggtggtgcttcgtgtcgctttctagtacagagcagtcttgcggaggctggtatgtggtgagtgtgtctgtgtcccacgggagaggagcgcaccagccccgtgggtggccggctgctcccgcacccgccccgtgggtgcccggctgctcctgcgcatcaaggcccgctcccttgttttccttcccaactcccttcacgtggagatcttcttggctccttgcagagatctctctctctctctctctctttttttttttttttttttatctgagtgagtacttggtagaaagggacagaagctcaaagttgtttaggcaaaaaggaggcacgtttgtgggacagcccaacccggaaggggagctggaaaggggctctgacatcaccacgcggtgtgtgcctctctctgcatgacggcggcatcggtttgcacggtttgcccaggatctccgaggctgccatttcccatcaacaaggcactagacctctttcctagtgtggtttccaaaacctcaggacaggcctctgcgtggtctagctggggatagatgtccacgtttgtggccatgggagtagggtgccggggttggcagcacccactagaaccacatggagagaatggcaggaggaatggcccccacaaaacaagtcaatgctatttcccaaagaggggagccaggcagcaaagcagggtatgtccaccctatgagccatgaggagctggtctgctggacaagctggactcgtaaagtcctatcagaaacctcccttgttctttcttcctcaaaactctctttttttttcatcctgccatttggctgaagcctctggcttattagagggcttatcagacacacttagatagcacaaagcatggcccagcatcctggtgcaaaactcccgtcctgtagtaataaagcacaaaccctttcccagttggagatttcctcttctctgtccgaggcccactgcagcctgctggacgcccgcatccgggactggcgtggtgttgacttcctttggctccacactccccctgctctttcacctgctacctggggctctgagcatctccaggatctgaggggttcagcacgcagaaggagagagataaaagacagagaagcctttacttggtgggcacaggtaccatctggcccggggcctttggcagcataatgctgaggtgctgcctctttctttcctgaatgcttttgtcatttcttcagaaatccagcttcttcccttgcagcagaactcacaggctctggttagccactcccagcacaggttcatccatgctgctaggatggaataaaatgaatccaaagctttccattggcctgtcccaatccaggttccaaattctctcctgctatggcttcatacatctaaggcattgactggtgttcctcactagtgttgtaagataacatctcgtgaaaggggtccctgccaaagggatgtgggaaagatggtatactaccttctcctctcagaaatactcaatgcgtaccagcatattgaaaaactaagatgccggctataaagaaagctatttaaccttcattactgagtcagttgccaaaccaacttgattatagaacgcttctagtggtaactgttatcagcatcgtgacaaaggcatgttctgcatagcacaattttgggaacactctaggtaaacttaattattctagttctagcacctcctaagaaattctccttttcataccttgcccaccttagatgtcacagtttgttttttattgccttctcctccacttttgcacccattttttttttttgagatagcatcttgctctgttgctcaggctggagtgcaatggcatgatctcggctcactgcaatcttgacctcctggactcaagtgatcctcccacctcagcctccccagtagccaggactacaggtgtacaccactacacccggctaatttttttgatttttagtagagatgagttctcactatattgcccaggctggtcttgaactcctggcctcaagcgatcttcccacctcagcctcccaaagtgctgggattacaggtgtgagccacttaacccaccctgcactcattttttttaaagcttcagttaaatgccattcctgctggtcaatggctttagccagaattttggcagcactttcttcccctccttttcaagcctcagatgtggatgccccagattttggatgggccagcgcatgaggtggggaagctcaaataccagaccaaggaagtgagttagtggaaatgaggagccataaagatgcttttatggtggaaggagcatgggttgaagagctgggttttaggaagagtgagatagtgggatcgattaggaacagactgaagttcttgagatgcccctatttacataggacaagttcagattgaggcagaaaaatagggtctggaggcagggaatataagcccaattcagacttcagctgtgacaggaaatatcctctccacagagcctatgttgtaaatgactttgtaactttacttcaaactctccatttacatagggcataccccaagtaaccagtggaatcctctagcgggtatttaaactcccaaaaattatgtaacagggcctttgagcccctatgctcaggccgctcccacactgtggcgtgtactttctttctttcttttttttttgagacggagcttcactcttgttgctcaggctggagtgcagtggc

SEQ ID NO: 424 - DNA, 51351 bp, Homo sapiens
aggaagtctaaaggaaggagcagagcttctgtgttaggtgctaccatcacacttgctcaccactaaatatgggaagcaatgactcttgtcaagaaattcccaaccctaagcaccttgtatatttgcacgccaatgaaatttgaacataggaaaccttaaaatagtgtttcttaaaaacaaatgggccgggcgtggcggctcacgcctgtaatcccagcactttgggaggcggaggcaggcagatcacgaggtcaagagattgagaccatcctggccaacatggtgaaacactgtctctactaaaaatacaaaaaaattagctgggcatggtggcgggtgcctgtaatcccagctactcaggaggctgagacaggagaatcgcttgaacccgggaggcagaggttgcagtgagccgagactgcaccactgcactccagcctgggcaacaagagcaaaactccatctcaaaacaaacaaacaaaaatggtggtatatggggagactaaaatatagaggggatggccgggtgtggtggctcacgcctgtaatcccagcactttctgaggccaaggcaggggtggatgacctgaggtcaggagtttgagaccctcatggccaacatggcaaaaacctgtctctactaaaaatacaaaaaattagccgggcaaggtggtaggtgcctgcaatcccaattactcgggaggctgaggcaggagaatcacttgaacccaatcggaggttgcagtgagccaaggtcacgtgactgcactccagcctgggcaacagagcaagactccgtctcaaaaaaaaataacaattatgccgggtgcggcggctcacacctgtaatcccagcactttgggaggccaaggctggcagatcacgaggtcaggagatcgagaccatcctggctaacacagtgaaaccccatctctactaaaaatacaaaaaatagccgggtgtgttggtgggcacctgtagtcccagctactcaggaggctgaggcaggagaatggcgtgaacctgggaggtggagcttgcagtgagccgagattgcgccactgcactccagcctgggtgatagagcgagactccatctcaaaaataaaacaaaataaaaataatatatatatatgtgtgtgtgtgtgtgtgtgtgtgtgtgtgtatatatatatatatatatatatacatacatatatatgtatgtatagagagagcgagagagagaccaggaaggcctcaccaaggtgacttctgcaggaggcttgtgatgaaggagcaccacatgcaaaggcctcaaagcccaaggcctggtgggtctgaagaacagcaatgaggccactgtggctggagcagagtgaacatgggggagaagagcaataatgtcgaggaggtgactggggccaattgtgtaggacctaccactttaaggaatttatggttcatattctgaatgagatgagaacctactagagaggtttaagcagagaaatgacaagatctgagatgtatctttaaacttatacttgaacaggatcacactggctactctactgagaacagattgtatgggggagagggcaaacaagggaaaccagttaggaagctataaaataagccagctgagagagatggtttggaccagggtgggggcaatgggggtgataaaaagcacttaaatttaatgtttgtcaagatacagctgataggattttctcttttttgagacaaagtctcttcaatctgtcacccaggctggagtgtagttgttcaatctcggctcactgcaacctctgacccccgggcccaagtgattctcctgcatcagcctcccaagtagctgggattacaggtgcccaccacctcgcccagccaattttttgtatttttagtagagatgggattttgccatgttggccaggtgggtctcaaactcctgacctcaggtcatgcacccgcctgggcctctgaaagtgctgggatcacaggcatgagccaccgcgcccagctgttttttttttttttaatcagtttcttccactatattataagctttacggcacaaggatgggggtctgtctggtcccccagtttctagcatcctgctgggcatgaaggaaacacttggtaaatgaatgatgacctccaatttgggaatggtctcttctgcttttggcacccaaatagcccattttacttacttgcttctgtgttaaatcctttgtctcaactcacctggatctgaggttcttagatgaatttcaggttttcgaagcaaccaggatgggagacccccctgagacaaacataaagagaacaaagaagcatgtaggttttgttttggggtgtggtggggaagctaggaagggaaggaaggaagggaaggaattgaatatagtgctggagatggccctagagtgtgggcagatgggagtagtctaggaactgcacaaggataactggttctatcccttctccagctaactcaccatctcccactctgcacagatgtaaggtcctggtctcagtatgaccaacaggttcgctagagctgcctcattcagaaaggcaatgaggtcccggctgccattaaagttatagaccccaggctgtggctcgtggtagttccagggcacataactgagaaaggaagaggttaataggaaccaaggtgaagagacgccagggaggcctaacggctcaggccttgcagggaatctccaggaagcggttggaaggaggtcctggcctgccctttcccacccttggcctaggagtcctggcagtcttcctgtcccgaccttctttataagggggcggtagaaaaagtagatcccatccctccgcggctcttgcgagcacttcttacaactgtatggcgttgaggccgctccatcgcatcttcaaaagccggtcggcccaaagcacccgcggtacccgaaagtagtgcaggctgccagacacatagcggaacggggccccgtctaggagaaaccggtcatgacccctatccactacgaacgaccgagtgtctgcctataaagagaaagagacgctgctcagcagacgcctggagggagcgtcgagggtcagcgcctgccaagagcggaagagatggaactagccctgcgggttgtttggttgttactttggactttctctcatccgctggatctgatcccgctcaccgcacccggcaggctggttcaccgtctcatcttacctggggcagcagtagcgtcaggctgagcggcagcagcagggaacgaaggcaggacagcttcttgggagccatggcgtttacagcgctcctctagtctgagacggcggacagaccgtcacgtgtcggattcctgggagggaacctcagcgagcaagggggcggaaaccacctcaagttgccaggcgtttagcctggacttcctctccagcctgcagccacccccttactctactagtttgtaaaatttctacatcatgttaaagtgcagttcacgaaccagcttcatcgacatcacctgggaacttgttagaaatggagaatctggctgggcacgatggctcacgcctgtaatcccaacactttgggaggccgaggcgggtggatcacttgaggtcaggagttcaagaccagcttggccaacagggcaaaaccctgtctctactaaaaatacaaaaattagccgggcctggtggcacgcgcctgtattccaagctactccgagggtgggggtgggggtgggggtgggggtgggggtaggggctgaggcaggagaattgcttgaacccggaaggcggaggttgcagtgaaccgagatcctgccactgcactccagcctgggcaacagagcgagactctgtctcaaaaaacacaaacaaacaaacaaaagaaatgtaaaatctcagatcctacctcagacctatagaatcagaatttgtattttaacaagattcccaggtgatcctaggcaccttcaaaattgagaagcatggctttacttgactgggctccctgaggacagggagtgccctgttcatctcaaatcctcagcctctagcacagggccgggtatatagtaggttaaatctggatgaatcaatgtcataaccaaaaggctaaaacaggttcagaaccaggggaaaccattggaaaatcttcagggtgatccggggtgtggaagggaggaaccaggtcacaagaaggacctctttcctggagagtcctgtttcagcaaaacagccattccctcctggccattccaccttctttggaagtgcacccctctccagcttacccctgcctgcctccgcaacagatattaaggacaactgctttgtgccaaagctcgaaaatctgtgaatttccgttccttttgcctttacagtctcaagaatgggatgtgaagatcagggtaataataattacggtttattgacacgtactgaaggctatgtgtcagatattgtattaaacactgtacatctcatttaatcttcaactccatgaggtagataattatttccattttacagaggaggagaggaaaggacagaaacattaagtagcctgtccaaggtcacacaactacgttaacggagctgtcatttgaactagtcagtctggcctcacagttaagctacttaaccttatgtactattatacctattttacagctaccaaaagtaaggatccgagaggttaagtaacttgcccgaggttacacagctagcatgctattaacactcaatttagaaactggaagtctggttcacaagcctgagctcttaaccactgagactaggggtagtgggatacaggccagagcccagaaggttgtacgggatcaggagaccaggccaccagacccgcccctcactggatccccctccaggctgcagtgtagttggccgctttctgccccagagcgccagaggtatgaagcctcctacctccaacattgggagatggaggtcctgggggcctcgggccgagcccggctttgctcccctttggcgtaggtgcctgcgtcttgacccccaccgaaggccaagtagagaaccctcaccagggtcctgggacccgtccacccctacacctagctagcccggagcctctcagctccgcgtccccacatcctccggatgcccagcggttgctgagataccgcgggccgttacgccggcgcggactgatgatgtcagcactgcttccggtcggtggcgcttctctctggcccgagccaggtcagtccggcagtgcagatggcccatcccgggctctgggctcctagaccggggtgggccctgccaggagtgggcctgagcctcgcacgtcctctgaaactacgctatgctctgcttttgcggcgcgatgggcgtgggagcgggggctgcccaaagatgggctggggttggaggaagtggcccggtagccgctgtgtgtcctgaggccgtaaggcgcctgaccccacccctgaagctggcgacggagcagggcctgttttctctacactatagtgtaggttccagagacctgggcctgagctctccgcattggtacttcatgggtcgtctggattgtgccggacctgtgaccctgccgttgttttctttccagcatgatccgctgggcccccagcgcatctcctggaagagcccactcaccctggacgagctcttcggtagcctcagaccgtccttgaagaggatgactgagacattatgggccacgcgctgtgtgtctgctctcggggaactgtcatcattgacaataagcgctacctcttcatccagaaactgggggaggggtgagtgtttggaagtcagttaactagtcctcaagtttatgatcattgaaggacagcggtgtgcatatgcttggggcacaagggttttatccctatccctgtcctctctcacctgacagaacctagctacacagtatcaagaaggtggattctggagccaggcctgctaaatccacctcgtgtgaccttgataaaccatgtttttttcatcagcttaatggagatgattattatccctcactgatggagttgtgaggattaaatgagataatgtgtataaaatgtctcacccaatgcggggttgacaagtacttgataagtgttggctattatttatttagcatctgtcaagtgcagaggtctctattacgaccataggacctcaaagatttctatatctctgctcctgaggagctcacggtgtaatattcttcagatttctcttagagccacatcttgggaaggtttctgctaaatgggaaggacaccccactccccaccaggaaatttctctaggtccaagccatgtgggagatgaccatggccctttattgacccctttggcccacagtgggttcagctatgtggacctagtggaagggttacatgatggacacttctacgccctgaagcgaatcctgtgtcacgagcagcaggaccgggaggaggcccagcgagaagccgacatgcatcgcctcttcaatcaccccaacatccttcgcctcgtggcttactgtctgagggaacggggtgctaagcatgaggcctggctgctgctaccattcttcaaggtcagaaagactcctggttatggagggggttgcagcagagccacctactcaagggctgtgtgagcagtccagcatgttaggaagcagggaccatgtcctgggtttggccactttagattttgagtttgaggtgtgtatcatgaaagggctgataggctttgacatagggaagggatcaggcctaaggagcagaggctccaaaaacatctccaactgtagggaaacttgtgttgcagagaggtacgctgtggaatgagatagaaaggctgaaggacaaaggcaacttcctgaccgaggatcaaatcctttggctgctgctggggatctgcagaggccttgaggccattcatgccaagggttatgcccacaggtcagtgggaggaccctgtgtgcttgctggggcccagaggaagagcctcaccaggagacatgggaggtctctgttctcccaagaaacagcctgtatgattcttttgcttgctgggattccagccttcctgtccagagatgctcataggtcacttctacttctctacagagacttgaagcccaccaatatattgcttggagatgaggggcagccagttttaatggacttgggttccatgaatcaagcatgcatccatgtggagggctcccgccaggctctgaccctgcaggtaaaagagtctccaggttccttttctcacctgttccccattcccaccccttctggtgcatgtcccagtttggtcacatgaccatgacctgtgccccacttttgagctctgggatcactgttccaggactgggcagcccagcggtgcaccatctcctaccgagccccagagctcttctctgtgcagagtcactgtgtcatcgatgagcggactgatgtctgggtgaggagcatgtgggtgggtatctgggtagggagggctgtggctctgtacccaccgtggagtagagtaggttgttggtttctgttgcatggggcgccaggaaccacaatatgtccccatccacttcaacttccttcctgggaaatgtcactgatactgtacccagttgtaccggatgtggtataatctgtgcccctgaacaaggtgagtacagctcagtgtcagtagtgaaggcactggctaagcaggggctaagctaaacaggggctgcggaggcctccagctgactggcagtttctctggaccctggtggtgccatgtggctgaggtcagcgtattctttttagcttatggagtctccttttaccacagaagtaaagggagagatgtcacctccactggtccccttctagggactaatcaagttatgctcagtccctaggctgcgtgctatatgccatgatgtttggggaaggcccttatgacatggtgttccaaaagggtgacagtgtggcccttgctgtgcagaaccaactcagcatcccacaaagccccaggtgagtgagcaacgaatagggcatcaagtgtttcagactcccccctggtattagctgagttgacagataggtgtcatccggtcaccctgggctcctccctccacaggcattcttcagcattgcggcagctcctgaactcgatgatgaccgtggacccgcatcagcgtcctcacattcctctcctcctcagtcagctggaggcgcttcagcccccagctcctggccaacatactacccaaatctgaaaaagcagcatgttgagaagatggccccttgtgccttggaaagaggttcccatccctcattggaatcaccacccattccatccaggacttctcttacacttgggggtagcggggtcaggacaatcatctcagtcctgcatcttttcttctgctttcttccctccaagagcaaaacctgggcaaggggacttactgagtgggggtgggtgggggttgggaaaagggaaactggtgggatatggaacatggctctgagcaggactgttgagctcacatagtgttctgactccaaatctgggagcaggagaatgtgtaaacaagaataaagtggaagcaggttggtgtagatcttagtctcagtgttcctggagtgagagaagaggtgcaaggggcccaaagtcaggttgccatttcaggcgaactgcctgggaaggaggaatggtgcagagtcggcaatggtgtgacttcattctacaggaggttggttagcagtggacagttctagcttgtcttagatcaaaacttaaagctgcttgggctcaagctggcatctgcctgtgtcaagaactagggccccctaaaaacactcaactagttctttccttccttcactcctggggtgagtagcttagtcaaagctgcctagccggtttgctaggcaagggcctctgggtggagacacctgaggaagctttgagacaggtagattacaggtctcccatcctcagcctaggggcgaggggagtggaggtggcagcggcagctgttttggcctgtgtctccctgatcgttcaagctcatacatggttaatgattaatgaggcagtgtggtgtggcagtatccagctgccacttcctgcctactctgctgagtaaacaggggccctgtcttagctgggcttcaaacctgttccctagggaagggctctgttccctgaatcaccagggaggaaaggcaagggcagggttggcatctcctgctcttttgtgatccaagcctcctcccccgaaccatgtctaccccacagtatgacatcagcatggggcctggggctcctgttagcaaagttgaagctttccccagggccctagcaggagtctcccactagctagcacagaggctgaggccagaaagaaatcacaaacagaggggagatgacctgacttttaatggcacagccccagctccagcaaagcagcaagacaggaagctatgcaaagctgctcagaggtgcagtggcacaaacaactctaggagatcgcctgtgttccctcccatcccccaagcttatgacgtggctccatgcccaggaactctgggccagcccagccccactcccaaaccctcataatgcacagaggagcctgggccaagccttgcttccagagttggtaaatgtagaggcagcaggaagaacagggtagcagtctaactttcaaagacagaaaccactggattatactcctacttggaaaggagctgaagactcatccttcaacagtttgtgcctggattttggtcctcatttcctccctatactgagtaaccctaggacttcaatttaaagtccctggggttatgcttcctgggcctggcaagaacccctttgcaggtctcaccttcagcgatggaagggataagggtcatgaacagcaaacagagcagcagcagcatgaaggggaaggcagcagaagctcaagcactcagagggaacaagaaaccgtgcaaggaaactgtttatttcgaaaggattttgcaataaacatagtgaataggctccaggcagctgctttattcttctccctcatcctcgtcctcataggagtcgatgcccacctcctcataatccttctccagggcagccatatcctcacgggcctcggagaactcaccctcctccatgccctcacccacataccagtgcacaaacgccctcttggcatacatcaggtcgaacttgtggtccaggcgggcccaggcctcggcgatggcggtcgtgttgctcagcatgcacacggcacgctgcaccttggccaggtcacccccaggcaccacagtgggaggctggtagttgataccaaccttgaagcctgtggggcaccagtccacaaactgaatgctgcgcttggtcttgatggcggcaatggcagcgttgacatccttgggcaccacatctccacggtacagcaggcagcaggccatgtacttgccgtgccggggatcacactttaccatctggttggcaggctcaaagcaggcattggtgatctctgccaccgacagctgctcgtggtatgccttttctgcagagatgactggtgcataggtggccagggggaagtggatgcgagggtagggcaccaggttggtctggaactctgtcaggtccacattgagggccccgtcaaagcgcagagaagctgtgatggaggagacaatttggctaatgaggcgattgaggttggtgtaggttgggcgctcgatgtctaggttgcggcggcagatgtcatagattgcttcgttgtccaccatgaaggcacagtctgagtgctccagggtggtgtgggtggtcaggatagagttgtagggctcgaccacggctgtagacacctggggggctgggtagatggagaattccagcttggatttcttgccatagtcaacagagagccgctccatcaggagtgaggtgaagccagagccagtgcccccaccaaagctgtggaacaccaggaagccctgaagtcctgtgcactggtcagactgaaaggcaagaacgagaaagaacagtttaggtaggggaggggcctgagggactctatcacctggctccataaagcgtaagatacatcagcagtcagggcaaatactgaggatgccatagcagcaccacactcgagaccatgtatagttagagatgacctcctgaaaggatctgaaaaaaaatattcctgaccattagcacagtctcaaaagttccctccctcccaagacacactctcaccagcttgcggatccgatccagcactgggtcaatgatctccttgccaatggtatagtgaccacgggcatagttgttggcagcatcctctttcccagtgatgagctgctctgggtggaagagctgtcggtatgggccatttcggatctcatctggaagggcaaaaaccacaaagctatgctcagcagggaccttcctcccccagggtggtagctgtggccagatgcatggaaggactcatcctcctgccagcctgagataccagagtgtgagagaaacccagaccagctgcccaggccagtctcagatcagcttgccttctgcagcttcaagtacggctaggaattttcagggctaggaatgcctggtctaaataccctctctctccagggagaagctttgagtcatgctccacccccttcaattttgtccccacttcctctcaccaatgaccgtaggctccagatccacaaaaactgcccggggtacgtgttttccagcaccagtttcacagaagaaggtggtgaaggagtcgtcccctccaccaatggtcttgtcactgggcatctgcccatcaggctgaatcccatgttccaagcaatagagctcccagcaggcattgcccatctggacacctgcctgccccacgtggactgagatgcattcacgctgagggatagagagaggggacacagcatgagccccacatccacaagtcctcaccttgcgagtctctcttccaccctatcatctaccagctaggatgactcagttggcaagagtggagggttggggctgggcagaggtgagaagagagtagcagcctgcccgggctcccaggtacaggactccccacctggaggcacccagcaatgcaggccaacctcttagcccacttctcagtggggaatctgtcaagtgagcactgtggctccacatgacaaaaggtttcctagaggtatgggtttacagctagaggccccccccccacttgattaattatttgctttgagtatgaacagctagaattcatagaaccctttccctctttctttcctgtaagctgcagaggtgtctcagccatccaatctggcatcaactgaccacacgccatcaggatgccctcctccctcacctttaaatcccatctggctctggggatcaatcccatctggctcctctccccacctccacccccgcaccctgggtgtcttcaccactttcatctcccgtgtcagcccgcacggaaatagcggcggtaatgcttgtaagctcagacagcaggggccagcaataaggtttgagggtactggggcgctcactgccttaggctccgtccctgtcagcccgaaattaacccctaaagcactaaagtccggcagggcccgcgcgctcttcccacaccgaaatggcggggtgacggtttccaaatacccagaaaggaagtggaacctgcggtgaggccccagaggtgacccgccttgtcccgggcaggatgggcgccatcctgcagcccagccctacatccgctctccctctggagtctttacagttatttcccagcccaaagcggggattgggtttcggcccccgctcctgggctataaataccaccccctacatgcacctctctcccctccccccaacctggcctcggcccgcgcagtgctcagcgccagctgtctctgcccatccgcgcacccgggcttcggctggagagggccagctcgcttcaggaggccgaaccccgttcccaccaaccctctcagctcagacgcggggtgctgagtcacggggggggggtggttctgtggatagttggaatgcatacacagaggaaagggggatgcggcaccaggtaacctgaccccttccaccttctagcgccaagcacgtgctcggtcagtgctgaggaccagggactggggatgtaagagggcagccaaacccgtcttcttttgcccgcggaaaggacggggcgcgggcccgcgtgactctcatacagagtcgggacacaaatgctcgtaaggcaggagcagagtgccaggaagggttcctctctgttactgaagagtcgcactccaccccaagccccaaccccagccaccgaaggtgaactatacggctcggccaaagtcaccaggagggggttggggagggaggatgcaaaaccctcgcacctcctggagacccggaacgcccggtggaggtccccgagcatgcctggaagaagtgtcccccaaaggagaggggcaattaggggacaggcgcgaccccggccgggccgcactcaccatggtgagtccgggcggtgcgtctcacgttgagtcggggtgacaggtctcagtgagaactgcgctagctgcagtgccgcaccgcccttataggcggggggggggcggggcccgcgttccccgctcgcccactagaggctgggcggcccgcaggccacgcctcccgggagggtaagcggcccccccgaggggcggagcctggcctggtaccctccccaagctgcgcgggggtccctcacctgtcccgctgggattaagagtcgcgattcgggctttaaccattctttcctcgttttgagcagacacgctgggctcccgagggcctccgcggagatgcagggtgctgtggcagggcgagtctcacctgcacctgcgtcctggaggcaccggtcatccaggtgttctgacttaggtcgggagcaggcgaggcggtccttcccaagcggccacagctggccttcacccctgcccttccagccctgcctcccaggagactcgggccggctgtgaggctgtggcgcgtccccggggagcccttgccagctgcctgacgcttcctggtccccggccggggcggcagcctttcgccgacgcctgtgggcggccgaggacccagaactgcacagcctgagccccagattgccaatgccttaggcgctcccgcagagtcgagccccgcagcctgtctgccggggccgaccccggaatctgccgcggctcgccggccgcccgcgggtcagtggcgctgtcatcagcgcagtcactatgatgccctcgctgagggcacctgcccactcccctgctgccagaactgcgggagcgctgaccgggggacctcaggacctggattctcctccaggctaccctgtgtgaccttgagcaagtgacttaacctcactgagtccttgacattttcgtgggtgaaaaggagacagtgatgtcatagtggaaacattgttgtaagctatcaaaatgtctgttgcctctgaagagaaaagaagaaaatcgagattctcatatcttggatgattctgactcttggtctcttctgtctctaacccaagagcaggatctgcaacccgcaccttaatggtctcagcactcagcccctggtctccgcagaagcccttctttctacatttcattccgttctctccaccccatcttttcaagctacttctgctttctctttctctctctctctctctcttttgagtcagtgtcttgctgtgtcacccaggctagagtgcagtggtgcaatctcagctcattgcaacctccatctcccggctcaaggccatccttctacctcatccttccacctcagcctcctcagtagctgagaccacaggcgtgcaccaacaccatgcccagcttattttatttatttatctatttttgagatggagtttcgctcttgttgcccaggctggagtgcaatggcacgatttcggctcacctcaacacctgcctcgcgggttctagcgattctcctgcctcagcctctggagtagctgggattacaggcatggatgcctggatgatttttgtatttttagtagagacggggtttcaccatgttggtcaggctggtctccaactcctgaccttagatgatccacctgcttcagcctcccaaagtgctgggattacaggtgtgagcccccacacccggccttattttttgtatttttagtagagacaaggtctcgccatattgtccagatttgtcttgaactcctgagctcaagcgatccacccgcctcaacctcccaaagtgctgggattacaggcctgagcaaccaccccagcctgccttgcattttctaattgtctcccttcactggggaaagtcatctggcagtgccccaggtgctgctggtttgcagatcttaagaaacctgtcttcctggctctacatcacttggaaaggattcacccctccctcccccatcacctgacaacacaacataataccatgaaagaactagtgatggcaactctctatcaacaaaataggcaaggcatggaaaggaatatagtgaaatatgacaaggtctttcttcccagtagacttgccatctgattgggagaacaagactcattcataaaaagaaaactgacaggggcgtataatgaggcttctttggggaataaggtcatggtccctacaaagaaaggagccgtggtgactataggacacatggcagtaggttgcagaccctccctgaacctctttttccttgtgctctcctatcctagcagaatgaacatagtaagagacttgagctatcttaggaaaaactctaaacctctttgaccttcaggtgcagattcttcatttgtaaaaccgggataacaacttcagattgtgaatatcagatgaatttagagatgtacatattcacatcaaggcactgtgtaagtagctgtgacatttattttagtgcatatagcacatcatgctatagttatttgtgtacatgtccatcttaatattatagatagcaaactattggaggtaaggactgtgtcttattcatctttgtttctagctcctagcatagtgcttagcacacctggtaagcatttgctaagtgtgtgtcagaagaattgtttcacttcagagatggtaggcagaagaatgctaccccataaagatgtccacatcctcatctccaggacctgtgactgttaccttacatggcaaaatactttgaagatgttattaaggtaaagatcttgagatagggagatgatcctggattatcccaggtaggcccagtgtaatttcaagggtccttataagtgaaagaaggaggcaggagggtcagagtcaaagaagaggtcagacctggtgcagtgctcatgccagtaatcccaacactttaggaggctgaggtgggaggatcacttgaggtcggcagtttgagaccagcttgggcaacatagtgagaccctgtctctaccaaaaaataaaaattataaaataaagaagaggtcaaaagtaagtagaggtcagaatgatgtgattgttggctttgaagagggataggggccatgagtaaaagaatatgggcagcctctagaagatggaaaagtcgaggaatagattctcccctagaatttccagaaggaaggcaacctggccaacaccttcatttcagttctgtaagacccattttggcttttttttttttttttttttaagatggagtctcactgttgcccaggctggagtacagtggcgcgatctcggctcactgcaagctccacctcccgggttcaagcaattctcctgcctcagcctcccgagtagctgggactacaggcatgtcccaccactcctggctaattttgtatttttagtagagatggggtttcacagtgttagccaggatggtctcgatctcctgacctcgtgatccacccacctcagcctcccaaaatgctgggactacaggtgtgagccactgcgcccagcctttttttttttttttttttttgaggcaggatcttggccgggcatgtaattccagcactttgggaggccgaggcaggtggatcacgaggtcagaagttcaagaccagcctgaccaacatagtgaaaccccgtctctaccaaaaatacaaaaaattagccaggtatggtggtgtgcacctgtaatcccagctactcaggaggctgaggcaggagaatcgtgtgaacctgggaggcagatgttgcagtgagccaagattgcaccattgcactccagcctgggcaatagtgagagacactgtctcaaaaaaaaaaaaaaaaaaaaaaaaagagacaggaagacaggatcttgctctcttgcccaggctggattgcagtgctgaggcaggagaatcgcttgaaccagggaggcagaagttgtggtgagccaagattgtgccattgcactccagcctgggcaacaagagcgaaactgtctcaaaaaaaaaatatatatatacacacactatatatatatattttatagatatggggtcttgctgtgttgcccaagctggtctagagctcctagccataagctcttctcctgccttggcctcccaaactgctgagattacaggcatgagtcacctggcccattttgggtgtttttttttttttttttttttttgagacagtctctctgtgtcacccaggctggagtgcagtagtgtgatctcagctcacagtgcaatgcaacctccacctaccaggttcaagcgattctgctgcctcaaagtcccgagtagctgggattacaggtgcacagcatgcctggctaatttttgtagttttagtagagataggatttcaccatgttggacaggctggtctcgaactcctgacctcaggtaatccacctgccttggcctctcaaagtgctaggattacaggcatgtgccaccatacctggcctcattttgtttgttttgttttgttttgtgtttgtttttgtttttgtttgacacaaggtctggctctatcacccaggctggagtgcagtgacgcaatcttggctcgctgcaacctccacctcccggcctctagccatccttccaccacagtctcctgagtagttgggactacaggtgtgcaccaccacgcctggctagttttttttttttttgtattattagtagagatggggtttcaccatgttgcccaggctggtcttgaactcgtgagctcaagtgatctgcctgcctcagcctccctgagtgctgggattacaggcatgattcaccatgcccagcccacctggctcattttggacttctgaactccagccctggcagataacaaatgtgtgttgttttaagctatgatttttattacaatttgttacagtaacagtaggaaaataatacgacaacaatagaggtatgtggaagctaccatcttaagatgggcaacaagctccctccagttcgccacagtcctcatcactctctgtgtctccctgacacagaacacaagtgtctgttgtcatttaacttcatacgatcagcccacgttacacatttatgataccctggccactgtagctaagagtttataatccttgagcacgctttctagctgacaaaatggagaagacatgggtgcaggaagaaatgcccaagatggccgggagcagtggctccctcctgtaaatcctagcactctgggaggccgaggcaggcggattgtgaggtcaggagtttgagaccagcctgaccaacatggtgaaacctcgtctctactaaaaataataaataaataaataaataaataaataaataaataaataaataaattatccgggcatggtggcaggcacctgaaatcccagctactcaggagctgaggcaggagaatcgcttgaaccttggcggcagaggttgtagtgagccgagaatgcgccactgcactccagcctgggcaataacagcaagactctgtctaaaaaaaaaaaaaaaaaaaaaagaaatgcccaaggcatgttagtgaaatacagattctgcttctgattgtgtgtgtgtgtgtttgtgtgtgtgtgtatgtcctcaggatgtatacagatctccagaattagggccataaactctgggtgagtatgcaggtaatggtccattttaccagatcaaaaacttttagacattcacagacatgtacagaatctagaaaatgctaccagatgttgaattacttttctaattcactctcccgttgaattaacttttcagtccatctacctatatgtgtactctccctctgggtctctctccctcttctcctttcccattatcatctccatcttttctgaccccttcccagggtctcacctttatcttggagcagggcagcaaggtactcaaagtttaaaatgtttgcactgactccatctgggagagatagagccacagccttagtgatgtgcatccttcagtttttccagactagagcatctcccagccatcctccttctcacagcactgcctttacaaatggggtagccctactcatcacatatccatgaattcacccctcaatactctccctgcagacttgactcacatgctccgctgagatgcttttgccaaggtctctagtggcctgcctcttgccaaatccaaaggccacacatctccatcttcatctttcttagccgctcacagcagcatttctcatggtcgattcttctttccttcttgaaattcttttttgttggttttgatgacagcaccggcttctagcttttgtcctggcccctccttcttggtggcctctgatagcttaattttaaatgatgttccccatagcccagtctcaggttctcttatttccttcatttatttttctccctgaaggagcaattgttgaagcttggtgatgaatatatgaggttttattatattatctctatttttaggtatatttttaataatattcatcataaaaagttattgtaacatttttggaattatttaaagagaattattaaaaaataattttggaattattttaaaactagagtatatacattcccatacaatagtgaaggaataggataaaaagaaatgaatgtcatatatatgctgacgactcaaatttatatctccatttctgacctctcctctgaacttcagattcatatgactaattgctttcttgacatctccacttgaaagcccatgagacatctcaaacataacacagtcaccatggaactgttttctaccctcaccccactccctgccaaacctgcttctgttctaggcttcccagtctgagtgatcatcttccttccaagtgcttgagttaaaatcttaggattggccgggcacggtggctcacgcctgtaatcccagcactttggaaggccaaggtggcggatcacctgaggtcaggagtttgagaccagcctgaccaacatggtgaaacgccgtctctactaaaaatacaaaaattagctgggcttggtggcgggcacctgtaatcccagctgctcgggaggctgaggcagaagaatcatttgaaggaggcgaaggttgcagtgagccaagatcgcaccatcgcactccagcctgggggacaagagcgagacttcatctaaaaaaataaataaataaataaataaataaaatctttattttaggatcactttcctctctctctctctctctcctctccctcttttaagttagaattttttggctgcaaataatggaaaacctaacttatcaatggcttgaacaatgagggcatgtattatcccacaagaaatctgagtatagggtctttccagggttgattcagtcatgtcaccaataactccagtgtttctagctttctgcgctgtcatcctcaaagagcgggtgacatcttccctcaggaacacaagatacagcagctctaagtatcatgtccttatatgactctgtcttaaggcaggaaatggggggcttcctcccacatctgtttttatcaggagaaaaacctttccttgaagcgccctagcagacttcccccttctatctcactagcttttgcctaaaccagtcactggagggagggagttaaatggccatggatggtttggactaacctgtacacacccctaggtctgggggaaagctgtcttcctcaagcaagtgcaagggtgaatactcaaataaaatcaggaccttgctagtgaagaattgggcaggggcaggcaaggctgttgagaagctctgccaccacctacactagtatgtccttcactttactgccaacccagctacttctcaccaccccctactaccatcccgttattcctagatgccttcagcagcctctgaaccagcttcctgcctctaggcttgaaaccctaatgcagtctccacacagcagctgcagtcatctctctgaaacacaagctaggcaatgacgcttgtttcaaaccctcctgttacacttatataaaagccattctccttccaaggcccctccacctctatgatctcatcttgtagagctctctcctttcctcactctgggtttttggacacactgggctagttcctacctatgattgtttgcacttattattctgtctgtctggagaactggtttccagatcttgcctcgctgactcctcaccattcagccctcagttcaagtgtcaccttctggccgggtgtagtggctcacgcctgtaatcccagcactttgtgaggccgaggcgggcggatcatgaggtcaggagatcgagaccatcctggttaacatggtgaaaccccatctctactaaaaatacaaaaaattagcctggcgtggtggtgggcgcctgtagtcccagcaactcgggaggctgaagcaggagaatggcgtgaacccaggaggcagagcttgcagtgagctgagatcgtgccactgcactccatccagcctgggcgacagagcgagactcgagactctgtctcaaaaacaaaacaaaacaaaacaaaacaaatatcaccttcttatagagtggcttctgttcagtctaaaatagcagcccctgcatatctttctgttccattatccagccttgttttcttcacatgcttattgctatctggaatgttcttgtttgtttattgtctgtcttccccatgaaaatgaaagctccattttatttctttttgagacagggtcttactgtgtcacccaggctggagtgcaagtggcatgatcacggctcactgcaaccttgacctcctgcgctcaagtgagcctccctcctcagcctcccaagtagctggggccacaggcatgtgccaccacacccagctaattaaaaaaaaatttttttttttgtggaggcagagtcgcattatgttgcccaggctagaatgtaagcttcttaagagcataaacttgccaggcacagtggctcacacatgtaatcccagaactttgggaggccaaggtgggcagatcacctgaggtcaggagttcgagaccagcctgaccaacatgatgaaaccccgtctctactaaaaatacaaaaattagccaggcatggtggcatgcgcctgtaatcccagctacctgggaggctgagacaggagaattgcttgaacccgggaggcggaggtcgcagtgagccgagatagcaccactgcaccccagcctgggcaacaagagcaaaactccattccccaccccccaaaaaagcataaacttttgtgtttatcactgtatccctggcacctgaaatggtgcttggcatacagcaagcactcaatatttgttgaagaaattaagagtattcatggcctcttatgttttaatctagatgcattaaaatgctttaaaaatctcagtcttggccgggcacagtgcctcacacctataatcccaacactttgggaggccaaggcagatggatcatctgaggtcaggagtttgaaaccagcctggcgaacatggtgaaacactgtctctactaaaaacacaaaaattagcggggtgtgttggtgcatgcctgtagtcctaggtactcgggaggctgaggcaggagaattgcctgaacccaggaggaggaggttacagtgagccaagatcacaaaactcagtcttttcattctgctttacataagacagctgactgccattaggatagttttctttttggagttggtgatacctaggttgactctgagagtccaactcccaaggccagttgggagaagtttcagtgctacacaagagagttttgagcccagtgggccctctgggccccatatcactccatctggacaataattcctgaggtccatggtttcatgggccaacccagtagaaggctgagctttcttatctttgatatgttaagtggctgggtctcttctttgggcctctttgttccaggtgggagacagaagagttctaaccttcagtctgtagccaaagccagagttaaccaacttgagatcattccctagcttactgggttgacagggtctctgaaaaagtcccctgtttcaactgcactatgtaacacagtggctgaaatttcacattagcaactacttcctggatagggttgctaaataaaatacttttatttgctaaatctggcagacctagtcctggttttggctgctatctggaagagggactgaactgtacaacagtccccccttacttacaaagatatgttgtagggcccccagcggatgcctgaaatggcggatagtactgaaccttatgtactgttttttcctatacatgcatacatatgaccaagtttaattcataaattaggcacagtaagaggttaagaacaacaataggccaggtgcagtggctcatgcctgtaatcccagaactttgggaagtcaaggcaggcagatcacttgaggtcaggagttcgagaccagcttggccaacatggtgaaacaccatctctaataaaaatacaaaaattagccaggcgtggtggcatgtgcctgtaatccaagctactcaggaggctgaggtgggagaattgcttgaacccaagaggcagaggttgcagtgagctgagatcatgccactgcactccagcctgggtgacagagtgaggccctgtctcaaaaaaaaaaaaaaaaagaacaataatgatatagagaaataaagcaatgatagtaatatgccagcatcactgctcttgagcggtggggctgttatgaggtagaataagggttacatgagcagaagcatcgccacagtcgatctgataagggatccggctactcagtggctaatgggtaggtagtgtcaacagtgtggatacgctgcacacagggatgttctagacatgatggagtaggatggcactagatttcatcacactactcagaatggcgtgcagtttaaaacgtatacattgtgtttttctggaaccttctctttaatattttcagactgtggttggctgcaggcaactgaaactgcagaaagtggctaatggggggctactgtggtgtgatttccaggcaacatgagggcccatttgaggctagtggccatgcgttcgaaacatcagtcagcatggttctggatttttctatggccactgtttagctgggtgagtgcagacacagagctggggacaaaacaaatttaaccagggttctggtttagtcaaacaaggatgttgaagctagtgggaggcaagacagttgaggggtacaaaagggagtgaccctggctggccatggaactgaagactgggaggaaggagataaagaccgaggaggggctgctgtgcacactctgccatgtggaaagaggggaagcagagcccgagtcccagataaatcttaattccagcattaattaatccccatgtgacctcaggcaggacactagggatttcaatttcctttccttcatcctgggaaagggaggccctgccttgcctaccttacagagttgttgagggattcaaaggaggtacggagagaaggtgccttaagcataaagcagactaggcgcaggggctcatgcctgtaatcccagcactttgggaggctgaggcaggtggatcatctgaggccaggagtttgagaccagcctggccaacatggtgaaaccgtgtctctactaaaaatataaaaattagccaggcctggtggcaggtgtctgtaatcccagctactcaggaggctgaggcaggagaatcgctcgaaccccggaggtggaggttgcagtgagctgagattgcaccactgcactccagcctgggcaacagagcaagactccttctcaaaagaaaaaaaaaaagatgcataaagcaggatacaaatgctagagactagcctttttatttcagaattttgcctaagactatcgggagactccttttctggggacataaggccaggctagagcagcagtgacttgccatggcctaggaagagacatttaggaagtgccttgaggccctgctcatcctcttgctttgcccttggagagcaacagctgttttggactaagcacttaagaaaggttaccttgttagtacctcgtaatactacctctccccattctccagagagagaaaaaaaaagaagttttaattgctagtagctattagaggtgggattaaaaccaagctctaggtcgcttgttctatgatattctgagtttccaggcaggatgtcctgaggcttgatctcttggccgaggactcattatttctggatcattgcagagatcttcttagtcccacccacagtcgacttacagccctcagcaaccctagggcaggggagtgcaggggtttgatgggtgggggcggtgctggagctcagggtcttgatttctaaatcatcttccacctgtgaagtgcaggctgtgccaccaggaaatgggattgcgtgactgacaacagataccatgtacccagaggcctggatacctgtgtggagttactagccctggcccctcctctgcccacctcagctggctcccctgtttgggtgcaggcccagagcttgcctcgtactctgtgaccaagtcaacaggccctgccctcccaggccgtttctaacaacatccacctgctgagagccacccagcgagtataaggaggaggctggctggccgctgcaggcctctcacagatctatccctgctcactatcctgcagcagacagagagacaagaccccagccagcccctgtccaggcagcatggtgagtagaaggggccttggggggactgagcatgcaagtgagggtcccagtgggcccaagatatctggcgtgaaggtaccttgggagtccacatggtgatggggctacagtatgtggcgaggtggggagagggaaagagacttccagatgtggctgtggcccccaaatgtgcaggtgtggggggcatcacagggggtagggaaggaaagtttaatggtaaccaggttgtggggctgagcctaggctgagaagcagggctgctgagggggtctgaatttaggtgtggggagtgtgggggaagcaggacttgagcagaaagtgtaggcgatttcctctgctggctgaggatctccagaccctgggccttgccacaggttcactgttgggctctgatcccaccttcccaccatggggacacatcctccatggaagcttctcccctctggttcctccctccaccctgcccatctgctgtgcctttgtctgacctctcatgtcagttacagatcagtggggagaagaaggaggagggaaaagggggtgctcccatctgtcaagagctggctgtgcctggggcttatttgatatcttttacccacctccctaccaggcaggatagaagaacagttaagagcatggttggtgccaggccatccctgctctaaatattcttggttttgctcatggccttgagcaagctacttgacttctctgagggtcggtttcctcatctataaattgggggtaataaaactacctacctaaggtgaatgtggtaaagattaaatgagataatgtgtataaagtgccaccttcacctggcaccttattagtgcttaataagcagaactaagcaatgtaacaacacaggccgccggctatgagattcttctctttctacagtcatgaaaaaggtgctagggaagctgaggtgaaatgacttgtattggatcacagagagatgggggtttgaggccaggtctgtgtgactccagaggctgagttcttttttttgtttttttttttttgagacggagtctcattctggagtgcagtggcgcaatctcggctcactgcaacctctgcctcccgggttcaagcgattctcctgcctcagccacccaagtagctgggactacaggcgcttgccaccacatctggctaatttttgtattttgagtagagacaaggtttcactatgttggccaggatggtctcaatcgcctgaccttgtgatctgcccacctcggcctcctaaagtgttgggattacaggcgtgagccactgcacccggccaggggctgagttctttgccccaaaactgctgcctccagtgtgagacatcattcccagaggggccagagacaccttgcatgggctagtagttctgggggccaggacgatgtctgggtctgtggacagaactggctggtcaggctcagaggtgcagcaccaggcaggtgattggtgagccaaggcagccccaggattggacctgggatttctcctgtccttgaggtctcagctcaactcattatctttttttttttttttttttttgagatggagtctcactctgttgccctggctggagtgcagtgatgcaatctcggctcactgcaacctccaccttctgggttcaagcaattctcctgcctcagcctcccgagtagctgggattataagcatacaccatttttgtatttttagtggagagggggtttcaccatgttggtcaggatggtctcgagctcctgacctcaagtgatccacctgccttggcctcccaaagtgctgggattacaggcttgagccactgcgcccagcctcaattcattaccttctcttactatgacatcagggattgagggtgggaaattggaaggggaacccaacatgcatggcacaccctagtgtgtgttaggcagtgggccaggcactttgcatgcattctttcatttaattctcatagtttttctaggaggggctcttattattgtctacatttcaaaaggagaacattgacaaagaggttaagatttttgctcaagacaagtagagaagtaattgggctggaatacagattatttatggattaatctcagtcatctaaaaatcatgaaaagtcaggcctttgtgttatataaaaatagtcaatgaagtgttacatttttggagaagtcatcctcattaaacaattaagaaatatttcaggaatgcaaaaaggtataaataataacatgataggctgggcggcggtggctcatgcctgtaatcccagtactttgggaagccaaggcaggtagactgcttgaccccaggagtttaagacccacttgggaaagatggcgagacctgtctctacaaaaaaatttaaaacttagccaggcatggtggtgcatgcctgtagtcccagctactcgggaggctgagacaggaggatcccttgagcccaggagtccaagactgctgtagttaactatgatcacatcactgtactctagcctgggtgacaaagtgagattctgtctcaagaaaaaaagaaaagaataatgtgatgaacagcagctatcaagcttgagaaatagaatctgtctccaattgcatctatctgcttcccctgccagagagcaccattattccaaatttggagttaatgtctcctgtgctttatctttgtactattttcccttgcttccctcaccaatggctcctaatttctttctggacactggtgggtagattatcttgcacttctagattcattcgattccttcaatgttgctcattgagacaggcactgagcaagagtctataatctcaggactgcccgcatcttctgcttcccccaatgattttggcccagcccctacagccgatgcctgttgctcctcagtgccaccagtaaatgcttagatgcaggaggcgaggcaagcagagtagagtccaggaaccttggccctcagccaaagagccactcaaggaaggcaggcaggaaccatgtccaggcatgatatgtttccctctgtgaaggccgttctctgccctttgcccactcagtgtgagtgcatctcagtccacgtggggcaggccggtgtgcagttggcaatgcctgctgggagctctactgcctggaacataggattcagtctgatgggcagatgcccagtgacaagaccatcaggggagggggatgactccttcaacaccttttttagtgaaactggggctgggaaacatgtgccccaggcggtgtttgtggatctggagcccgctgtgatgatcagtcccagccacaaccttgtccctgggtaccacagcaagtcctactccataactgcagagcatggtgtctgtggtatagcttcccaggtgctgcagccaattagaactccacatgtacagaatcactgttactcagctcctgagtctgtaggccactccacatccctttccttattgaaaaacacatccaagcagcacaaacacatccaagcaggtaatagcagcagcctgaatgcagaacctgggacccggtgaccccactcccttcaggtcccctggggctccagcagctggattgcaaagggaggtggggcccaaaactctgcccactgcagatgaactttgaacaggcacataccgccagatcttccatccagagcagctcatcacaggcaaggaagatgctgccaataactatgcctggggccactacaccattgggaaggagttcatcgacctgctactggaccggattcggaagctggtgaggaaaggactgagggctggggcagggggaatgaatctggattcctgttgtgaggtagtctggacaccagattggggaaggacagcttcagcctctgggagaaacacacaggatcaggaccaatgaggagaggccctgcactctgatcggggggccaactgtaggttccagcctggagctggtgtcccctgtatctccgaagtggctggcctgatgctaggcagggtgtccattaaggcaaacatgttgatgggctgcctggccaagctgtggggttccataagcgttcccagaataccaccttgtgttacaaggatgtgggcagaagtccctgtgaaaggcagggattcaaagaatgtcagcccaaagcctctgtgattggctttggcttctacgaaggatggggatgaggttcctggattgttgttcttagtagagaaaccctctagaaacatccaaagttaaatcagcggggcatgggtgtgatggtgggtggagttggcaagttatgacgacaagatgagggagccctggagtcctgtgcactggtcagcctagacagccaactccacccaccatcatacccctcttttccagcatacaacagagctctgtgttaagggcctcaggagatttcagaggaagagggacagggaggagaaagggtgggccctggacccactctatgaggatctcttttgtgctcttggaaaagtcttccaaggagttcatgaaacttttgggaatttaaaacagcacaagttggttctttcctgtccatcagctgtgctccatgccccacatttcccctccccttccctgtctaggctgaccagtgcacaggacttcagggcttcctggtgttccacagccttggtcggggcactggctctgacgtcacctcattcctgatggagtggctttctgttaactatggcaagaaatccaagctgggattctccatctacccagccccccaggtgtctacagccatggtccagccctacaactctatcctgaccacccacaccaccctggagcactcagactgtgccttcatggtggacaacaaagcaatctatgacatctgccactgcaacctagacatcgagcgcccaacctacaccaacctcaatcgcctcattagccaaattgtctcctccatcacagcttctctgcgctttgacggggccctcaatgtggacctgacagagttccagaccaacctggtgtcctacctcacatccacttccccctggccacctatgcaccagtcatctctgcagaaaaggtataccacgagcagctgttggtggcagagattaccaatgcctgctttgagcctgccaaccagatggtgaagtgtgatccccggcacggcaagtacatggcctgctgcctgctataccatggagatgtggtgcccaaggatgtcaacgctgccattgctgccatcaagaccaagtgcagcattcagtttgtggactggtgccccacaggctttaaggttgatatcaatcaccagcctcccactgtggtgcctgggagtgacctggtaaagtgcaacgtgccatgtgcatgctgagcaacatgacagccatcactatggcctgggcccgcctggaccacaagtttgacctgatgtatgccaagagggcgtttgggcactgatatgtgggtgagggcatggaggagggtgagttctccaaggcccatgaggatatgactgccctggagaaggattacaaggaggtgggcatggatagtgtggagtggggggaagaaaagataggggggatgaatactaggggaatactgtgtgtctgtcctacataaagtgctgtggccttattgtctcacgaatgtctttttctctgggggaaaaccatggggggagggcttcttctccatgagagataggaacgctggtgtcttagcctctattccccagaaagcagatctgattttagatttcattatagagtgcaattacagcaaatagaatgggggccaagggaagtaaggcacagaaggaggaaaaattcaccctagagaaaatgcagctgaataaatggcatctcagaaccatccttgggtgagtgggcaggtgagggctgggggtggggtttatgcactggctctattcttccactagttaaacttttgccccatcaagcattaattcccctgcactggtggattgcacacacttgggctgtagagtcatcaggaaaccctgggcgaggaggaggtgctattaagttgcacatatgtgaagtcagtggaaccccacatggagctgcaacaagagcccggtgaggccaggaggatccgaagtgatccttaaagtaatctagtgcccactagcccatcctgcgatctggaggcttgtcttctccaggcaggaggttggggtaatagagagccctgacactggagttggttgaggcagaagagtggtgcagtggctgccacacagggagaatggcttgtaagggtaggaggcttacctcccagtaatctctgtcaacactcaccacttttttttttttttttttgatggagttttgctcttgttgtccaggctggagtgcaatggcacgatctcggctcactgcaacccccgcctcctgggttcaagctattctcctgcctcagcctcccaagtagctgagattacaggcatgcaccaccaggcctggctaattttatgtttttagtcgagacagggtttcaccatgttggtcaggctggtctccaactcctgaccttgggtgatccaccagcctcagcctcccaaagtgctgggattacaggggtgagttaccatgcccagccctgacactcaccactttttgataaagacagttgaccttttaacagtcctgtggcatcatgcacacacagcttcccacccccacttccaaacaaatggcaaattttaaatcctgagactgagtgaggcaggagaatcgcttgagaccaggaggcagaatttgcagtgagctgagatagtgccactgtactccagcctaggtgacagagccagactccatctcaaaaaaataaacataaataaataaaaaaatacaatacaataatatttttgtaaggacaggatctcaccatgttgccctggctggtctcgaactcctgggctcaagtaattctcccaccttggcctcccaaagtgttgagattacaagcatgagccaccatgccttgctaaaagggctgacttttaaatctccatatatttgacttatgcgtctttccatcaactggtttcaaacttgggaagggaaaaggtgttactctgggagcccttcacaccccaagaaatagccatcatttagtgagcatctactatgtgctaggtcctgtatccataagatcttgtttaattctgaggttaatacagttattacacccactggaacagaagctctcagacaggccttggactgtttttcattgttctactctcaacaccccagtgttgcccggcatattagatgattaacacttgttggatgaacttgttcaatgaacacctattttatagatgtggagactgagactcaaagactcgcccaaggtggtaaatggaggagttgggattcaaacccaggttagcctgcaccaaatcatatgttgctcccccacctttttcttaggtgccctcacttcctgctcacagtggttccaggcagccctccagacaccacctcttctcagcctgccaggtcccgagtgcccagacagtgactcaggtgcctcaggggcagggagtgggtgacgcttcacaatgccctgcccaggctctgggaaggagggcatcgatgtagaggggagagtcccagcttctgggtctgaatgggggtagaggcttctttggggccagattttggggctatcagtgccctttggaaaacatcccccaacatctcctaggaggtggtgagggcctgggagaggccaggattgggggtggggagggaggtgagctcttcacctgccaagacggctagggatcgagagaggcagctcgtctcccttcctgtctgctgaaccagccagcccaccctgggcagctatatagccatctccctgaggtcttcctgctagtaatactctgctggcaggccctggcaggcctgggttggactgggtatggctgtggagaggtggcaacccagacctcctgaggcagctaggagcaccacccagcctggctcctggggactccctcagtgcaggggaaatgctttcatccctgatgattctgagccaaagtacaattgcctccttcaggcagacaaaagagacaggtttccaagctcagattctacccaacaaatttattccctgggctctgatgtgtcaggaacacgcctggcttcaaagctgtgttgtcaccattctctccttctggaacgccacctccccctgcttgtctcaatgttgccattccttccagcttaggtcacagccatccagaacctacccagccccagggagctctccctcttctgaattctttcagcacctacctcggtctctatttttcatttggcacttggtgtgggctgccttgtatgatatcacttggcttcttgtcaatgtcttatttccccaactcaatttttaacaattagtatgaatttgaacagttattaggtgcatatgcttcagaattcaaaaagtatcagagagatttaggaacaagaaaaataagtctctttcattttgttcccctcttggcagccaccactgttaatgtttttgttagtgtttccttccagagatgtctacatatatataggttgaatatcccttatcggaaatgcttgggaacagaagtgtttaggatttcagattttttcagattttgaaatattcgcatatacataatgaaatatcttggggctgaaacccaagtctaaatacgaaatttacttatgtttcatatacacctgatacacattgcatgaagggaatgttgtataatgttttaaataatttttttgttttgttttgttttgttttgttttttgagatggagtttcactattgttgcccaggctggagtgcaatagcgtgatcttggcttactgcacctccaccttccaagttcaagtgattctcctgcctcagcctcccaggtagctgggattacacgtgcctaccaccatgccagctaatttttgtatttttagtagagacagggtttcaccatgttggccaggctggtctcaaactcctgacctcaggtgatcctccagacttcaggtgatcctcccgcctcggcctcccaaagtgctgggattataggcctgagccattgagcccagcctatgttttaaataattttgtgcatgaaacagtttgtgtatataaggtcaggtatggaattttccacttgtggcatcatgtcaggtactcaaaaagttttgaatttttgaacatttcacattttgggtttttggagtagggatgctccatctgtactaccatgcttgtatgcacatttagtatacactttgttctacaccttgttttttcagttaataataaatctggaagatggtccatatgaatactgttagctatgcctcattctatttggtcacaatataatattccatcgtatagcataccaacacttgttttaccagtctgctattaacgggtatttagattgtttccaatcttttgctattaaaaagaatgctgcaacccttgtatgtattttttttgcacatatatatgaccatacattcttagaattgagatttctgggtcaaagattatgcattttaaatcttgctctctttaaaagtcacaccaggccgggcacggcggctcacgcctgcaatcccagctacttgggaggctgaggcaggagaactgcttgaacccgggaggcagaggttgccgtgagccaagattgcaccattgcactccagcctgggcaataagagtgaaactctgcctcaaaaaaaaaaaaaaaaaaaaagtcacatcaaattacccaccctcccactaccaatctataagaatgcctgtgccctcagccttgcccatacaatgtattcaacttttttcttttttttgtctttgtcaatcatccaataagtgaaacaaagtattttgttagggccatgtgcccgggtgcagtggctctggcctatagtcccagcactttgggaggctgaggcaggaggatcatctgaggccaggagtttgagaccagtctggccaacatggtgaaaccccatctctacaaaaaatacaaaaattagccaggggtggtggcacatgcctgtaatcccagctacttgggaggctgaggcaggggaattgcttgaacctgggaggttgcagtgagccaagatagtgccactgcactggagcctggatgacagagcaagactccatctcaaaaaacaaaaccccaaagtattttgttgtagctttattattattattcttttaaaaattattattatttgagatggagtttcactcttgttgcccaggctggagtgcaatggcacgatcttggctcactgcaacctccgcctcccgggttcaagtgattttcccgtctcagcctgccgagtagctgggattacaggcatgtgccaccacgcctggctactttttgtatttttggtagagacagggtttcaccatattggccaggctgatctgaaactcctgacctcaggtgatctacccgccttggcctcccaaagtgctgggattacaggcatgagccaccatgcctggcctgtcgtagctttagtttacagtttttttgtgaatgagattgagcatcttttcatttgtttaaaagccagtatttcctcttctgtgagctgcctgtccctttgtccatttaaaaatgtcattgtctttcattagttggcatttctttgtggacaaaggaaattaaacctttgtctgctagatgtgctccatataatttccctcagttgtcatttgtctatgtcctatccccttgagcacagagattggaatttaaacttttttatattctttttcttaatataacaagacatacacggtaggtgctagacaaatgtctgttggcacagcagagtaagaagaaaaaggcagagatctggaaaatttggagtgacttaacccaaccactccttcctcttataccaagtctaacccttagtctttgtgtcagtcaggactcttataaacagcagaagctaactggcaaattgtttcaagtcccctgcccccaacaattatagagatatcggatagcacacagaatcaatgcaagggccagcaaacaagggtcagcaatcagacaggcacctagggaagctgggcagccagtaccacagtcaaggttgggcacaggacagcctgtgtaggagactcctgtcccctccaccctccgcagtgatcctcctactctcgtccctcacctgcggcagtagcgctgacacttcctcctccagacactagaggccgctgttggccccatcgcctccaccgccgccgcagaaatgaattcctaaaccagccttgctattccgtgacttgctccagattcaaagtcccagttggagcatccgattggcggagctcatgtcttctgcctgcaaccccagagccgagtcagggagagcaagcattggggctttgtggcaaatggtggcctgctttccattagggcccttgcgatgggaattccccaaatgtaggcaggaggttctgatggtgggcagccaggaaaccaggacactcacaccaccttcttctctcacgtccgcctcaaacccttctcgttggcgaagtattcctgggtcccccagcctaaagcacttttctggactcacataaccattattgcttgagccaatcacgatgccagcaggaccgcagtaacacctaattcgtaccatgtctcatttgactttcaaacaaccctaggcactacctatatttagtgagaaaaaaagagtgctcagagattttcccaagtctcacagtaatgccaggttgtactctgtttccaaagcctcgggtttcccagcgggctacactgatgggctggtatcttatcaagttcaagctctgcaaaggcagggcttgggccacattcttctttatacggcctggcagcatcttgaatgcagaaaaatgctcagctaacgcctttggattggcctggatgggatcaagcaggagccagttctggaaggtttcctaactctccaatgaggcctgaacccagggagcattttgaagtggaataggcctactcaggatcagtttgggaagacttgaacctggggaattccgttgtacggccccctttacctcacctcccccaaatgtgtcaaaactgtcaacaagaggtttgcaggtgttcattatttattcatcccacgggtagttttgaacccctacgactgctctaatagaccagtgagaaaaaacacacaattcctgtcctgtgaaatcgacattctagtgggggaggtgaatggtaataaaaaataatcaaaccaataaatgctaatttgtggctctaacaagcctgatgaaggaaatgccacgagatgctgtaaaaggcagttctgacctactcaggaaagccagggcagcctgctgggggacctggggctggagctgggagctgaagaagggggaggagttagaaccgtggtggggggagggagggaagagtctgagtcctcgaggtgggtgagtaagcatggatcatcgctcatgtttataagaaagtgacagaggaacctgggggccgagcggcttgtttgtgggctgccccagcctccgtgcgagcgcttctcgcttggatggaggcggggccgcagtctcccaggtcccagctggggctgacgtcgtcctggtgtgtgcccaaaatagccggctccgccctcttctcccggcagcccctgcaggcccccacccccccaggggacaggcggagccggccttctccccgtctctagtagtttccgcaccgctgacgcatgcctgcgcgcacagctgggccgggcgcgtcctacgcagcagccgcgagccgggctgcgggtgccagacggttcccggcggggggcaggggcggggcgccgcaggaggccgggactcctggcggaggaggtgcggccgggggcccgggtcaggctgggggccctggatcggactgctggagttggggggccccgatagggctcctgggcctgggcgtcgagatagctcttggccccggcctgcgggggcagataaggctgccggagggagcctagtcaccggccgcaagcagagcccggtgtgctccgcttccaactgggagcgccttccgccacccggggagggggactgctgcagccacagggtggggctcttggttctttccgcctgactccttctcttctgcagccccaaggaggcccgcctgacgactgaccagttgccatggcatcctactacgagatcctagacgtgccgcgaagtgcgtccgctgatgacatcaagaaggcgtaagtgcctccgtatgcaacagaagacctctcaccctccacccgccaccaccatggggcacttcagagtgacacctgtaggtgtctgagggaaccaggtcgttagaaagcactggggtgcttcttccgagtgacacctgcagggaggaaagagacccctggtagagtacaaggagaacgtccagagagtgaagtagttagttcctctgggagctgcactgtgttatgggttgttctccagttgatcttcccctcctcctcctcctcctcctcctttcccctcccctcccccttccccctagatttgggcattctcaggctgcagtgcaaagatgcagtgcaaagaggctctatgaggaggaggggccggtgtccctgtactcttcgaggccacatgtgccccaacctttgcagccccagtccagtgagccctagggaggggctagggaccctggcattgtatccgcttgtacatgtggtcccagcactggtggcggaggagagagggtggaacttgatgaaaatatcacagcagcggcagccctagcagctggggtggactgggacccgggggtgaaaggacagtgataggctaatgggaaaacaggtcgttcggttcctgggtgggaagtgcctgcatttgtcccccgactctctcctctgcacccactttctgcaggtatcggcgcaaggctctccagtggcacccagacaaaaacccagataataaagagtttgctgagaagaaatttaaggaggtggccgaggcatatgaagtgctgtctgacagtaagggccggggtcaggcaggacccagcacatcaccccctacttcatgccccagctcacattttcttaaagcaatgtctctgccacctagtttcctctgtgcctttttccagcctgacatttaagctcccccctcccacagggacagctcagtgtctgctccccagagtctggtaggagtggctggcatgagacctgaaaggggaaggaagcagggcaggtaactcatgtgagctgagcctcctgcgtgccaggcattggtgggtgtcatctccatgagttctcacagccgtcctatgaggcaggttctatcacccctattttacaggcaaggaaactgaggctgagagaggtgaagtaacttgctcaaggccacgcagagctggaatatgaatccaggtctgcctttttattgattcattcgaaaagtaattcagtgaatggtgacagtgtccggcactcgctgggtgctggggaaactggaggacaagcaggcactgtctttgcccagaggggcagggaagaccaacacctaccaggcacacacacagacacagttacagcttgtgaagagtattccgagggaagaaacagggcaggtggagtgctagggaataatgtgcacttgctttagttctggtggttgtagaaggcctctccgagaaggtgacatttaggctaagccctggtgaataataatgtagtaatcattagctaacatttattgaacactttctatgtgtcaggcactggtaggcagtttacgtggatggtctcatttgatctgtgcaacaaccctgtgcggtaggtgttgtgatgacagccattttccagatgagaagaggccagctgtgtgaaaggctgagttgctgcctaaacctatagcccgtgtcccctgggtcccctgctgtgcctgctttcccccgccaagtgtcagagtgtcagtctctggacaatcctttgaacgtcctagcctgggaggggagcccatcccagagggagggtgaaatgatctggtctctttttgcagagcacaagcgggagatttacgaccgctatggccgggaagggctgacagggacaggtaggtggagtggtgaggcccaggaatggaggtggggcagggaggagaggggcagggcagattcttgcaatggaggctctctcaggctcctggctgtgccttaggtgaggtcccccgctcagggcaggatgcatgccctaagctctctcctcatcctgcctttccaggaactggcccatctcgggcagaagctggcagtggtgggcctggcttcaccttcaccttccgcagccccgaggaggtcttccgggaattctttgggagtggagacccttttgcagagctctttggtgagtggactctggaagcctctgaatggctcaacttccccctccaggcctgtccttccatcagctgggaggccctgaggtggaaggctgagaggggacgggaatgccacggacagaagattttgtggagctgggtccagtgagagccgggacagaacctcacgtgtgccagaacccccgtaatccaacagtgacacttcacagactcaccttattaaattacaacaataatacattgttagacttctatagtaacagccatgaaagcaagactcaaagcatcttgtgacaatattgttattattacctataaaacagatagtggtattttttaatgatagatatgtgccaaatattttacatttcgtaagtctctagtgaatcctgacaggtgggcaattttctccccatttgcagatgagaaaactgaggcacagttaatagcccagagtcacataacacatggcagagctggactcctagctgtgtctgcctgtcatcgcgtcatgatgatttgcctgtactgaaagagccatctgtcctccatccctcttccccctccttccttcctttattctttattgtggacagaattaaccagtgagtgttttcgaattcaacattaaaaaggaatttataaataagcccaactaaaaagcggaaaagaaaaaccctacccagttgcttagtggtttatacttccagacttgggctcacacacttttgaggggaaatgtcattaccagatgactgctaatctgtttacttgttgcagatgacctgggccccttctcagagcttcagaaccggggttcccgacactcaggccccttctttaccttctcttcctccttccctgggcactccggtaagttctgccccttcccacgtttgcaagctccgattcctggaacccctggcttgagcttgttgcttttccaagcctgtctcctgtgttgggagccctgcctccagcagccctgcgaggcggcctggagcctcggtgaccacaacaggcagcgcagtcttcttctaaccacctctcctcctcctcccttgtcccgatgccagatttctcctcctcatctttctccttcagtcctggggctggtgcttttcgctctgtttctacatctaccacctttgtccaaggacgccgcatcaccacacgcaggtgagagctccttctggggccatagaggggtgagaggtctgctggggagctgtgttcaaatagaaagttggctccttgagggcagggcccagtctgcgctctctactgcggtggccagaactgggaccagcgcctgcaggattctgtcactgctcgttgcctgaactgtgctgtctcccacagaatcatggagaacgggcaggagcgggtggaagtggaggaggatgggcagctgaagtcagtcacaatcaatggtgaggagcagctcccctacccagcccctggcaggaagccccagccccaacctcagcagcctcctccccaaactgctgctctctgaactcacttagggcttgggagggagtggcaacaggccagactggtaggatcagagatggcaatgtcgggaagggggtgaaggagtctcacgaagccatcgccgtcactgtgagtggggtgccttacatttgcaaagcactttactatttttaaagcacttccagatatacgatatcctctgtattcttcaagcatctgggggagtacacagggcagatggtatccacttagttttaatttggggagcctgagctgcagcatagttaaatgaccctaacttccaagtagcccaggcccaagactctttccttccaagtaaggagtagagccaggagtcaaactcaggacgcacgattcccggagcagaactgcccctgcaacaccatgctgtgcagggccgtcaccacagctaacctttcacgcctgctgactcccagcactgcgtaccaagccctttacatgggctgacatatttaatcattggaacaatttgagtatgaaggcactatcatcattcccattttcttttttttctttttttgaaacagggtcgtgctcagcccagcacgattatggctcactacagcctcgacctcctcggctcaagcagtcctcccacttcagccccctgtgtagctgggactacaggcgtgtgctaccatgcccagctaatttttaaactattttgtagagatggggtctcactatgttgcctaggctagtctcgaacttctaggctcaagtgatccttctacctcggcctcccaaagtgttgggattacaggcatgagccactgtgcccggccatcattcccactttctagatgaggaaagggaggggtagggatgttgagtgacttgcctaagggtaggagcttctacctggtagagctgaatacttccttgtgctcaaaatcacaagcctaggtgccaaaatgcatgtgtgccaattccaaataagagactctaagtggtcagggttgttactgtgtgaggcagcctggcagtaatacccctggctcaggttggggcctcatggtggctgtgactcttgcaggtgtcccagatgacctggcactgggcttggagctgagccgtcgcgagcagcagccgtcagtcacttccaggtctgggggcactcaggtccagcagacccctgcctcatgccccttggacagcgacctctctgaggatgaggacctgcagctggccatggcctacagcctgtcagagatggaggcagctgggaagaaacccgcaggtgggcgggaggcacagcaccgacggcaggggcggcccaaggcccagcaccaagatccaggcttgggggggacccaggagggtgcgaggggtgaagcaaccaaacgcagtccatccccagaggagaaggcctctcgctgcctcatcctctgaacaccgggcccaacctgatctgatccagatcttgactggggggtctgactcactgtgggaagagaagaggggagtatcctgagttgtaggaactgctttccaactccaagctccctccacaagtttccctcccaggccccccacaccccagtgtggacttgggatttgctgtgctcagcccagggctgataggtccctggtgaagcccagggtggggggtgtcagggcagtggaggggcccgaggagccaggttgcatttattggatggggagctccaaggggcattagtggtttgggctgggccttttgtgccctggtactctgccacctgtgttgctgatggtgtcaaggaaggaggacttggcctagggttgtctgagccggagccggcagctccactggagagcagtgcaggcagagtggagcctcctgctctcctggaccagctgcagacccccaaccctggtttctgtgccatgttgcgctctgaccgtctctgttgcttctcttctggtgttgcttctcctccctcccattctctctgcaactccctgcgggccgcatcgcttgctttcactgccgtctggctaggactcccttcttccttccttccccgagaaggcctcaatgtggcgaggaagatgctggggccggtagggctgtgagatcttctggggaggctagccgggtggggcgggagcctctcagctgtccagattcagaactggagcccactcctcctccctctcgttgcctcagcctgccctcaccctcaggactaggcagaggtgaggctggctcaccctgaagaggtgggataggaccgggggaccccagagggaggcctaggaggggactgcacccatactgcttccctaccacaaatcagggctcagggagaggccatgcggccagcccaggtctgcatgctgagccccatcctccacagcttgccgctgacgctctctcctgtcaccccgcccctgctctctccccagatgtgttctgagctggatgccgggttccagaatcgctgcacagttccaacaggacagcgccttcccccatgcgctgggaggggaccctccatttctccccctcacccatgctgagtgtagagccggggcctgggtggcgggtgggggccgggtgggaggtggcagtagtcttagcctgtgcactctcttccttgggtgtttggtgctggctcctggggactacaaatcccagagtgcggtgtgcccggcctcatttctgatagatcccgcttgggggaggtggtgtatggttacggagctgtgcatcttgggacatgtagtagcccaggtcggcttgtcactcgctgtgagatggggagattttgtcttttgatttatccctgtagggctggcagggttgtagatgaagggggaatgatctgagccttggttcccctgacacgtcttgctagccccagggttagagtgggcagggcagagccgcgcagcacctgggagcggtacctttcccttgggcagcctggggtcccaggaacaagccagggcgagtggcatgtctgcctgagcagggtgtggccccagaaagctgaggagtgtgggctggcagagagcttcgagggcaaggccacccgcgggggcgtgtgtgtggtggggcttggcatgtgatggcagctccaggcatgccgctgcttgtatggctttctttggcctctgaccctgctgcccattctttccaacatcacagatgaactgcctctcctcctccctgcctggggagcccagtggccagggaggggagtggtggagccagtcgctgtaacactgagcctcagagacgaaccaaaaccagctgggctgagctcagatccagggggaaatgctggaagtcaataaaactgagttttgagagcttggtggtgtgttgtgttcttgggttcctactttccggggtggcccaggagggcctctaagggacagtgggtgacacctcaggcctcacacctccctttatgcccctacagctagaggtgcaggccttgccagttgaaggcagaaatgccctctttgaccaggctgccctccccaggtatgttatggaaccccaagcaatgcttcattctttgctttcacctcttgggggcctacaactggctttccctagcagccgatgttccccttatgagtggcctcaccccctagtactccacagcacagctaggaccatactcaagttaagacttaactgaggctgggcgcggtggctcacgcctataatcttagcactttgggaggctgaggcgggcagatcacttgaggccagaagtttgagaccagcctggccaacgtggcaaaaccccatctctacttaaaaaaataccaaaaaaaaaaccccccaaaaaacaacaaaaacacaaaaagctggatgtggtggtggtgcatgtctacatgcctataatcccagctactcgggacgctaaggcaggagaatcacttgaacctgggaggcggaggctgcagtgagccaagatcaagccactgcactctaacctgggcaacagagtgagactgtcacaaagaaagaaagaaaaaaaaaaaaagactgaaagcacagaaagctgagaacacacagtgaaacctttaaactgtacctgcatgaggcccacagactaagcccctgggtaggtttcattggctcagcccgaggtgtgagccagtggcatgtggtgtggcatgagtccagcccacccagggcccaggccccaaactcatcagggcccacggaagaaaaagccaggtaccccttccctttcatctctagccgctgtgctgggacaagcacctttccgttgtcaggcagggccaggtggctccccaggcctctcttctattccaggacaggctcttgcttcaccgtcaatcaccaaagggcctctactatatttttctcaaagtgaagaagcagcctaccctgaaagaggaatttcaaacctccatcctgagtcgggtggaagtttgcaaatggctgtttcttctacgtctgtctagcccttgagatggctatcactgacactgagcctcagcagagcgtgggtgagacagcgggagggcctgtggtctgctggcgggtcccttcactcctgctcagggcagatggtgcttgccctgttttttaattaaggagactgagtctcagcacaggtaagtagccctaacttccaagtagccccaggcctaaggctctttttgccttatttcatgtccaccccatttgtccaaggacacctcctgacatgcaggtgagtgtgccttctgggactatacagggtggagggttctgggagctggggtgagacagaaagtgtcctttatccccaggggaacgcctgtcctagcatctcacaggcctagcctagactcactggcagagttttgctatagttttgcctaaggtgtggcagacactttgctaatatcactttgttcaggcctcacctcaatctggcagcagaagggcacaaagcagctgccaagaactgagaggaggctaggcgcggtggctcacgcctgtaatcccagcactttgggaggccaaggcgggcagattgtctgaagctcaggagtccagaccagcctgggcaacatggcgaaaccccgtctctactaaaaatataaaaaattagccgggcttggtggtgggtgcctgtaatcctagctactcaggcggctgaggcagggaaatcgctggagcccaggaggcagaggttgcagtgagccgagatcgcgccactgcactccagcctgggtgacagagcaagactctgtctccaaaaaaaccccaaaaacaaaaaaagaattgagaggagaggtagtagagaggaggttagtcagccaggtgcaaactctaactccaccttacaatcttttttttttttttttttgagacagggtctcactctgtcacccaggctggagtgcagcggcacactctcggctcactgcaaactccaccttccgggttcaagtgattctcctgcctcagactcccaagtagctgggattacaggtacccgccactacacatggctaatttttttgtatttttagtagagacagggttttgccatgttggccaggctggtctcgaactcctgacctcaggtgatatgcctgcctcagccacccaaagtgctgggattacaggcgcgagccaccatggccggctaattttgtatttttagtaaagacgggatttctccatgttggccaggctggtctccaactcctgacatcaggtgatctgcctgcctcagcctcccaaagagctgggattacaggcatgagccattgcaccttacaatcttacaagttgtgttacgtgttaccacaagcaagttctgtgcctcagtctttccatctgtaaaatgggactcatcatgtaaagcaccttggagactgctggctgcataggaagcctcgttctaacgtagtgttcccacctagaagggccttactggcagctggcgctctcctgctgtgctctctgcacctcctgagagaccagcagggaccggctccgggctgaggctggggctggagtccagatgcacagcggacagaaatgcgtaggagtctgggttgcagctgcacagacaacacactaactttattcacactggtacaaaagtagttttttctagaaatgttctcttgcgccagaaggagagaggttgagcagcgcatggtgggagggtggtgggaggaggctgggcgtgaggccagggagggcagagcgcccaagtgtgagtcagaggcaggcccggggctgagaagcagggggagccgggtgtggcgaccctccaccccattcttccatactggagcatagggggacacacacagatgttcagggaactcccagaaccccaggagagctacaggagagccaggccagggaatgtaggcaggagaaggctctgggtagaattgctacccatgtcctttcctctcctcctggctgcagcacccccatgggatgccctgggctctgggatgccccaggctctggcatgcgaggctgggcaggcgtgccccttctggctttcccttcctgactcttctaggaagggctgagcatgcccaagaggtggctggtggggcagtgaggagtgggtacacagagatgctcacacaggcaaagagggacagaggctgggctgcccgccaaggggccccagggtctcactggggcagggccttgaggatggcattcacttcctccgccacggctgtcagggcaaattcaaactggtcctgaggaagggcagtggtaggatggtcatggagagggctgacctgtgctctgccctcaagatggggggcttttggtggggggagggccctgggcaggtcccctgggaggaagggagccctcctggaggaggcgcagaagcaggtgggaaaggttggcagctgctgctttccctggggtggccaagaagtgggtgctagggaagggtgggagctggggttggggcaggaaggcatggtcaccttagagcggacaaggccaggccgctggtcacggacatgctccagggtggcagcgatgtcaatctccttcactcctggagatggaggtggggatggggctgctcagggggtgtccagaggaggacaggacccagaaaacctgaggcctcctggaggcaaagagccttggagggctgggcagagcctggaggttgacaacctgctccttctgagctcccaggaccctgtgtgctggggagcctctaaaaagggcctgggggctgcgggcaccgtggggaagctccctaccttttgccatgcggttcaggaccatgtcgatgaggatgtaggtgccggtcctccccgcaccatcactgaaacaggagttagtgacaggtttagcttgagatgcagcagaaagggggagggacggaggaggcgaggaggcctggaggcctgggggaggggaggacactgggtgacccgttggggttggcttggagagggacagtgagccgaggatgaaggaaagctcatagcacctgcacgctgggacttgggccttgagaggggagtctgtgacctgtgggtgtcatttgggcaatgggacaaccaaagaggagagccatggctcagcccagaagcagaggcagcaggagggaattggatgggcctctctagccttcagccagctttttgtgtatagggggccaatggtcaatattttcaactttgtgggccacatacagtttgtatcacatacttttcttcttttttcttcacccatttaaaactgtgaatgccacgcttaggtcttggccattaaaaacaggtggtgtgctggatttggactatgcctgcagtttgctagcaccaaggggacaggcaggcaatgtgcacaggagacgcacacagggagtgggaccagagagatgaatctcctctccacccacctgcagtgcacgatgatggggcaggagcggccccggtagcacttgttcaccttcctgcaacaagaaatgggtgtgagggccagtgggcaccagcagagagggaaagggaagctgaaacacatgacgtgggcctctctttcttccttttctccccacctgc

SEQ ID NO: 425 - DNA, 104836 bp, Homo sapiens
atttttaactttataaatcaacttccaaactattttccaaattgccttcccatcagcaatgtatgaaaattccattttctccaaatcctcaccaatcttggtaatgccagtttttaaaatgtcagccattctaataggtatagtagtatttgcatttccctgatgactagtgatgtagagcaactcttcctgagcttatgagccattcatatgtcatctttgagtaaatgtctgctcagatcttttgcctattaaaaaagtctgattgtctgcttgttgatgagtttgaagtttattatgttctttaaattctaggcagaagtcctttgtcagatttatgttttacaaatatttatttccttgtcatctgtggcttgtctttaattttctaaatctgtctcaaagagtaaaagtttttactttaatttttttcttttgagacaaggtcttgctttgttgcccaggctggagtggtgtgatcatggctcccttgcagcctttacctcctgggctcaagtgatcttcctgccttggactcccattcctatttataaaatttttcttttaaaccatgttctttttctatcttgaaaagaatctttgtcttacctgtggtcacaaagatgttatcctgtgttctcctgcagaaattgtatgggtttagctcttatgtttaggtctatactccattttgtgttaatttttatgtttaaggaaaggtaagtgaagggttcatgtttttccatatagttatgtaattattattccagcactatccttttcttcatttgtcttggcacctttgttgaaaattaattggcatgtaagcatgagtatttagggttgtcttttctgttaatttatctgtctatccatatgccactatcatactgtcttgtaagttctccaactttgttcatttttgaaattgttttggctattttaaggtacgtatttccataacagttttagaatcaacttgtcaatttctacaaaaatcaccttctgggattttgattaggagtgcattaaatttctaggtcaatttagggtgaattgccatcttaacaatattgaatattcttatccttaaatacagtatacttctccaaaaatagttttctttcgtttatgtcagtgatgttttatagttctcagtgagcagggctataccatcttttcttaaatttcagtgtgatttactcttcaagtgagaaatcacaaggcttcttggaccaatctctaaatctgagactttggccagaattaagactgtataggctgggtacggtggctcacgcctttttaaacccagcactttgggaggccagagcaggaggatcaattgagtcaggagttcaagaccagcctggccctgtctctactaaaaatacaaaaattagccgggcatggtggcgggcacctgtaatcccagctacttgggaggctgaggcacgagaattgcctgaacccaggaggcagaggctgcagtgagcggagatcgcgccattgcactccagcctgggcaacagagcaagactccatctcaaaaaaaaaaaaaatgtatagaagtaaattattaaatttttatttatatattttagtttacattatacattttcctaataaaaattattttgacaggctgggcatggtggctcatgcctgtaatcccagcactttgggaggccaaggcaggcggatcacctcaggtcaggagttcgagaccagcctggccaacatggtgaaaccccatctctactaaaaatacaaaattagcctggcgtggtggcgcatgcctgtagtctcagctgcttgggagactgaggcaagagaatcgcttgaacccaggaggcggaggttgcagtgagccgagatcacgccactgcactgcagcctgggcaacaagagcaaaactccatctcaaaaaaaaaattattttgacttcttaatctttagattataatctgatagttttagtatttgaagagttggacttgttagagataaagtcttgcagaactaccagttcctttgtggtttttcatgtaaatactaacttaggcccttctagtcattgatttatcatttgatgtttcaatatgtgtctatttgtaatagtattaaattttaaatgagtgatttcagctgaagtagagtgttgctgccagcccagtattttgatctaatttccccaagaatttcatgaaattagaaatccttaccagcttacaaaaaaaatgttacatagaaaaattttcagtaaattcaaagaagtaagatcattttggggatctttaaattcctggtcaattcctgactttttttttactgtatggactgtcttgggccactctttatggtcctagattaccttcatctagtttgactgacttagttttggaaatcttcctcaacttcaaacctgtaaatttaaagaataaaaactgattttgctctcaggtaaaagaaaatgtaatcaggactgtgaccctgatatccttcaagtctgtaatgtattcaaaagccagataaataaacttgaatgatgtttaatcatctgaatttcctgaatcatcattccccctaccacctccctaccctaaccaccatagaagatccggacttagtggtattggactggaatgataaaaactatccagggaaggccgagcgtggtggctcatgcctgtaataccagcactttaggaggctgaggtgggtgggtcaggagtttgagaccagcctagccaacgtggtgaaaccccgtctctactaaaaatacaaaaactagcggggtgtggtggtacatgcctgtaatcccagcagttacttgggaggctgaggcaagagaatcacttgaacccaggagtccgaggttgcaatgagccgagagcacgccactgcactccagcctggatgacaaagcaagactctgtatcaaaaaaaaaaaaaaatccagggacaaaagaaacttccctaatctcactacccgaagatttagggacattttttggtgttttctctttttccttcagtttcctttggtaactgtagctaaatactgagtgatttgttctttagtttgccttaaaatattgactgtttccacaagcttgtgttttcattgttgttgtacagaactaggtgcaaatgacacagattaataaaaggttggaaatatgttcttttctctcctctttaggatgatgactttgagttcactggcagccacctgacagtaaggaatggctactcgtgtgtgcctgtggctttagcagaaggcctagacattaaactgaatacagcagtgcgacaggttcgctacacggcttcaggtatgtcactgctttacaaaaggtaagagagaactctcctgaaacaggactgatcttttgttaggtgcgacctatcaggtacatttcctgatagagtgtttatgacaccataggtaaaaattggcatttatagacagttgagcctatagagtctttggtggttctaaccctatcattttataaactgggaaatcgaagcaagttttagagtttccaatttgtgcatgagctagttggatattactggtcgagcatccctaatctgaaaatctgaaatctctaatgccccagtgagcatttcctttgagcaccatgtcagtgctcaaaaagttttccattttggtgacccagtgagtttggatctagttttgttaagtatattcataaataccaggattttggcccctgggctccactaggacccaccccttatatttcaccatccgcattttggtctttggattcattttggctttttctatgcatttgggctaattcgcttacgtttggttcctagttctggagcagtcctgctaataagttgacttcttcagagatagagtttccctgtgcttgctatggggataggctcaatgctcattattattgctggtttcaggctacatttgatgtaaagtgcagacaactgttggattttgaactcctcaagataactagtcatctccctctctgagaacccatgtatgactatgtaggcatgagaaatggagacatagccatcaatcttaccctgcgctgcccctttccttggagttactgagatcaccacagatgttttggttttttactaacaatcagtgaaacagttttccatttaattttcccatcagaggcagcttgtagttgacagtgctgagaagatctgcagccttgagccttttgcaggcagacggagaacagtgagaatagatgttgtgccattttctcgagttctgcagccatagaaaatgagcatgtactgagctttcatatttattttgagatatataatttcaaaatatatatagtatataaacagacattcattaaaaaacaaacgaggaaaacgatgttaacataatttcagtaccctctctgaggtcagctttgaactcattcatactctgacaagctgagaatcactgtgcattctcaagcatagcacgctccacagttttaggctgcatcccccagatctgcatcacagccttcttgtagcattcttctgttggtcgatagtgagcagctaaccacagtcagaagacattggttctattgggatgagcactttattctttatttttggtctaaatgtacttaacttgagtaagtggtataaggtcctttcattagtctagatcaccagtgtatcaggagggtagtgtggggatgacagttgaggattctgaagttgactacaagggtttgaatcctggcacttattacgtgtgtagccttagatgagttatttcacctctacctcagttttcttatgtgaaacatgaaggtaatgaaaatagaaaaatgagaattgagaaatggatgtccatctgttgtacactaaatgttcagtgtccttatcagtgccatattcatcaccactagtcttttcccacccaacctctgcaggatgtgaagtgatagctgtgaatacccgctccacgagtcaaacctttatttataaatgcgacgcagttctctgtacccttcccctgggtgtgctgaagcagcagccaccagccgttcagtttgtgccacctctccctgagtggaaaacatctgcagtccaaaggatgggatttggcaaccttaacaaggtagcttgccctagacactcctgtctacagatctgatgtacaaatagcagtcttcgttgtttacttggtgaggaggtggccttgcatttttgggcatttggctatgctcccaattgtgacatcagggctgaggcgtgtcagttgattctcttcagtgcctaagtctatcatcaagtgtctgttcatatggacttagtcttatggggtcatttcacaaactcaggcctataaaaaggggatcgtaaatgtcatcctaaataataaggattgctgggcttattttgaaagcagattagaagagactttaaggaagtctgttgaagccagtattatctggcccctgtcactggctcatgtgcttctttcttatggtaggtggtgttgtgttttgatcgggtgttctgggatccaagtgtcaatttgttcgggcatgttggcagtacgactgccagcaggggtgagctcttcctcttctggaacctctataaaggtaaatgccttctaattttaatcttttccatatccttacaggaatatagaatttgaaatattttgggttttctcaatatatatgccttaatttctctctttattaactcaacaaacaattcctgaaataccttctaggtactggggtataaaaatacctgccttcaaggagctcccaacttagtggggatacagtaagcggggaagcaggcttagaacagggcagtaggtggcctgatgggctgaacgcccaggttactggaggtccactcagcctggagggataggcccagggaggcttcctaccaggggaagcttgcgttctcattctcagactgacttgcccctgattctttgattacttctcttactatgtgtttatgaaattcctacctcctgttcagttattttcttttgtaattggacttaactgtatgtagacttgtaatatttgtaccccacctcattccaagaaaaggctgtaaaaataagacattggccttgtcagtgcagacacatcagctaaccgttggcttgctccccatccccagttctttccattactcctcactgcccagtggtgaatggtctttcacaccccagagcctctaacttcacagagggggaacttggctccctgagcacattgctttctgagagcagcagcgtgtcttttcccttccccatccaggctgtcaagtcctgtcagtgctagccttacaatctcttgcaaacctatttacttttttctattgcctacctcccagtccaagccattcttacctgttgcctggacggttaccaatagctactactgctattcctgcttcttttagtgactttctactgctgaaagaaaatgttcaaactccttatcttggcccatgctaaggttcttcattatctagctcatctctacttccttgtccatccccagattccaggcacattcggctgttctcacatcctggaaggcaccatgctgctttctgcctcagagcctctgcgtgtactgtggtctaggcctgggggtgctgcttctcccaccccctcgacccccttccttcccaacctgtcttactcagcattcaggtcttgacataaatttcaaagtatttcaaagacgacttccaggacacatctccactgccccaaatgtaaattaaataccccatattcttttccgtgtagcctacgtttttcttcatagcttttaagttaataattgtctgtgtaattttgcatctgttgctctattggagtaatagtttatatcatattttttatcccccttttctagtactgtgcctaccacctaagtctgttgcataattactcaccggatgggtgactgaagacagtcctgggcttggaggggcctgggatggctaaaagggatgtagtcattgtcatggagctatccaaggtagtcaaggttaagaattctgtgccaaagtaaagcgatgcttaataattcccttttattagcaagatctgaaattatatcttcagaactgctgtattttgccaggttagaagcagtgaggtgcctgagaatcttacttcactctagtctgccagctcctactggctggtgtctggcgacaaagagttctgtatgctgtttcagaaacataatctgtctcttcgcatttgaatggtactgcgtgtgtcttgtcatcagatttcagagcaccaggaataaggtggggcctgataaggaagtttttgaggaaagtctgtaggaaaaccctagaattatcctttctgtttccccagctccaatactgttggcactagtggcaggagaagctgctggtatcatggaaaacataagtgacgatgtgattgttggccgatgcctggccattctcaaagggatttttggtagcagtgcagtacctcaggtaagtaggtaggtggggcaaggagggatctagggttcagactcaaccagggtttaatgtatttgcagcatgttcttggtcaggacagtttaagctagaattgaggtctgtgcttttacatgaataattaatgtttggagttcatggcctaagcgtggggttcagaaaaccccccaggacaagagctggggagtctgaaggctgctagctgcatttctcctccggctttagagtcacaccagatccctgacattttagacaaaatggccaaactccagtgagtatctccgggaagttttcagagaacctcttggtactttttcgtgttctttgaaatactttaaccctttaggattcctttgaagggaaggatattgtgaatttataaaagagaataaaggccaagccctgtgtagatctctggattcatagacaggaaggcaacatggaggggcatccttcctgtctgaagtccttttgtccatgtgtgttttaaagcaggcattcatcacttgatcactggctctcacatgttgcccctctttctcttcacttgcatctccacccaccactgcttttccacctttcaaggattgatttgtgcttggtgtctcgtaatgacttttgctcctggtttttcttttagcccaaagaaactgtggtgtctcgttggcgtgctgatccctgggctcggggctcttattcctatgttgctgcaggatcatctggaaatgactatgatttaatggctcagccaatcactcctggcccctcgattccaggtgccccacaggtgagaagctggcaaactatctgggcttatttgggaagaggccaggatctcatgatgtccctgattttttttttttttttcagattttagtcattccatcttcggaccctttcagataaccaagagcagagttaaaaggatgggcagcatttctgatttctcataatttggttttgtaaatctaggcagtctacattcagaatggaggagtccagagtataagtcaaataacatttttccttattcaggttttctccctaaaaaacaaaaccatttttaattgcacttccattttgtaatggctcataggattgctgtaaggtctcaattactaggggcttccagggcatttctgagaaataaccctgggtccttgtctagacccttatgccagaccccactccaaagagcggtaagaattccttagtgtcatagcccagacctgctgagctgcgaggcttaagtgtccctgatcaccaaatgtcctgtgcttcagggtagcgaggctccctcccagaaggtagttatacatgagggaaggacgctttacaactgggtatctaaactgatgagaacacatgttaagcatcactttaggactgagcctaggtagagttttattgtctcatttctacttgtcaattctgggaaagtgcctactgataagggagactcttcgatagaatgatgaatagtaattgggggggtcagcctttaaaaaggtcaacagcaatttaagtacttagcaatttaagtacaagaataaaggtatatgtgcagcctgccaattttctctttttcccctaaaatagccgattccacgactcttctttgcgggagaacatacgatccgtaactacccagccacagtgcatggtgctctgctgagtgggctgcgagaagcgggaagaattgcagaccagtttttgggggccatgtatacgctgcctcgccaggccacaccaggtgttcctgcacagcagtccccaagcatgtgagacagatgcattctaagggaagaggcccatgtgcctgtttctgccatgtaaggaaggctcttctagcaatactagatcccactgagaaaatccaccctggcatctgggctcctgatcagctgatggagctcctgatttgacaaaggagcttgcctcctttgaatgacctagagcacagggaggaacttgtccattagtttggaattgtgttcttcgtaaagactgaggcaagcaagtgctgtgaaataacatcatcttagtcccttggtgtgtggggtttttgttttttttttatattttgagaataaaacttcatataaaattggccctctcttttgttcctttgagttggagttacatacaagatgggggcattactcctttggaaatgccaagtttatcctatggcaatagtaatacatgttttctccatgtttaaataaggaagaagatgttcatataaaagagaaaaatggtttgatcaggtcagaagataaggtaggggggccggtcctgtagaagcagtggacttcctggtcagtcggactaggcttcctcacttgggtgggggtggagtgtggtggtgtgccaagaacatggttattaggaaactttggatgcactttcaagatagaacacaaaagagctgaaacaaagtctgagcctttgggagaccagtctgcctttattcctgattccctccatgggtatgtgctaaaacttcccaattctactaaaggtggtggtgtacattttgggaagcgcactacataggatcaagggcttaggtaacagctggtttaacagattgccacaaacttagtggctcttaaaaaaacagaaatctattcgaaagttctggaagcttaaagtctaaaatgggtacacagggctgcattcattacagaggctctcagagcagggaggatcagttcatttccttgctcttttcagcttctaggtgtgggaaggctcgtggctccttcctccatcctcagagcacataactccagtttctgcttccatcatcacattgccttctcctgtagtcaaatcttttgtctctctcttaaaaggatactacctgtgattacatttaaggcccacctggatcatctaggatgttctgcctcatcccagcatccttatctgcaaagtcccttttgccatataagatgataaaaacatgttacatgctggttccttcccaggggctcctgactgactgacagatagatgataaacactgttactgcaaatccaagtaatgtcccttaaatgtggttttattctttcttactgtgagttaagggacatcattatatatattggtgatctgactggaagatgaaaacggagaaggcttttccccccctagtcttagaattcgtggcagtaatggaaagaatctgcacaccaggatcagggcagttaatgtttccagtccttgcagtatcagtaattggttaggtaaaatacccaattttaagtattacacaatgaaataaataaatatactagagctgcgccaacgcatagaagacagatgatacacagggatgacattgacaaaactggcatcacagactcgcacagagtatacggaaacgagggagctttattggttacatattgtactgcagagccaacagagagcattcgcgccagaggatacatgcagacaggcagctccaatgatacacatgcacccaaggagccctgagccactgctttgccctggtttccagcgacaggttctggcctccttggtcccatgcttggagctgctgcacctagactctaaggggcaggggtgagagagaccagagcacctgcctgagcaagtaggtgtggaccaacaggctgcccccaacaaaggggcctataatgcaataacagtttatttgagggctactttcttagccctctcaatctttaaaatacaaaaaaatagactttattctcttaaaaatacattccattcagtatatgttctgagctgggaagcagcaggaaaatagggcccctttcctatgatcctatggttgtgaggctttgaggagaaccctgctccccactcggggtattcaaaaaataatccctaaaagcagctctttccaaagcaatcttgtcagagaaataacaaaacctcataacaaggtagccagggacccagcctctgggtccccattcctttattgggaagtggtagcacttggcactgacccactaaatataaagaactaaaactgccccaggacgacaagtccaagaacactatagtgccccctgcatcccgaacactccactgacgggggttatttatgtgcaagcttgcctacagctgagggtggggtggcatccttggccccactgcagatccctttaacccacactgtgactctttctcattgccacccaaaagcaaaaaacagccacagcttctttatccacctgcagctttctctggtttagtatcagagtggcaaaaaaagcagcagcacgtggaagagatcagctgctggtactaagccagcttcacttcctccaaccaagcagctctattgccaggtcccccaactcactaggaaccctccaacaaccatacacctgccagtaaaatttaagagccaagctgcggaagaaaactgtcataaaagtgggtttgttgaccgggggcagtgggactatttggcttgattaaacaactattcaactaccaggtctcccctctacttggaggcttcctccaggacccctgatgatgaggcctgggtccaaacagtcacacctcagttgcttttcagaaacatgcctcccaactttgggatttgagagccagccttgccagccatttgaagcccagagaaacagcctccagcctttacttgctattacaatgttattttctgcaatgctgaggacacttaaaaataaaatctatctagaaagtgtgcagattaaagaaacaaaatatcctgaaataactgttacaagcaaatcctattgcactcagatttcaagatggcagccccagcaaaagggcatcacagctgtccctcttcaacaggacattttgagtagcagcagatgttggtgctgctgaaatgtggaaagatccagactttggcaccaggagctatagcaccagaatccagggctccaacactcaaagacaagaattattggcgagatctttttaggcatggcttggcgcccttctgtttccatcagcagagaagagccacagacttagtttcctaatacctttagttgaccaccacagaggttgattttctttgaactctcaaggttgccaaccagtgaaggagaatggcagggaggctgcaagtgaaggatggcagccttgagtgagctagtttctggccagtaagccaggagaagcagcagtaagagatcttggaaatagcatcttgagcatcagaggtggggatgtggacaggaaaggcaggccacatgacaatgcctttagattggcaaaactctgggaagcagaagtatgagcaatagattcctgtccctgaaagtaaggtaggtgctccccaagcctcctcactgccaaatctgatacagacaaggtcaggatgaacactggttcccatgctgagtgaaggcagagaagacaaattcctctggaggaagtcttgagtcttcctcttgccaggaaattcataggagatgcacaggaacaggagatacacagacttgggtactttccataatacctagactcctagaacgccaggagatactgtgtggcactgggcaaggctgatgccacaaagagcctcagagaccatcccatctaatcccttcacactttgcagattgggaaacaggcccacggagcttctctgagctcatccccatgagattaaaacatacagaaactaaaaaacaaggcccagaaaaacaattgagggcaggagggaagaacccacacggatgataccttccacaagcaaaaatcatcccatactattatagatggtgaaaacaggagaaccttagaataccagatttggtgcccttagagatcatccatttcaaagaactcattttacagacagggaaactgaggctccaagaagacaatgactcacccaaggtcacacagcaaggaagtaaagccatggggaaaaaaatccagcttaccagactggtagtttaatgttctctcattctgagggcaatagtgtctacttcataaaggtagcctttgaaagaggatcccttctttgaattgacagaatgctaaagaaaaagcactgccaagaatatacaattcttttcaacttccccatgtgactggtataaggaacctaaccaatttatttacgtggctttctgaaaagtttgctgcattttgaactatataaagctgaggccctcaatgcgtatgtacgtatcacctttcctccagcgaagtcatcatgatagtcgacttgcagaaatccggggcccacttctgtaggaatgcatcagcttggtaaagtgcgatgcctcctccatgggggatggagaaggaggaacaggagggagtagtctcacagtccatgcctctcatggagctattgcttgtggagtgactaaaggggtctgctttccctcttgctgggcacttcctagaaggcagaggatgctgggtcaggcccagcttagcctagggattttcccaaggtggaaacaatgaagtcagcttgaagtctccagccactggagagaaagcaggcgatgccagcagcattactggtgctcaggaaaggagatgcatgaggcttgcacctccaggtgcctttggaaggtgagcagagagagctggggttggggagggatgatgtcattccaatgggtatccgcatgagtatctgcatgctctgcttccaggagactggtaagccaggagccaggtcaaacttcaacctaaagggtagtctcataatcctttagaggcagcacagacccctttctgctttaagtctgaagaaaagaactccaaggggaaagaaatgaaagccccctagatagagctgatggctggtaaatcttatggggtacttgagcccattgggcaaatgaggagtgaagtggatatagtgaggagactgagaaaccagaacattaaccacacagacagaggctgccctaggatccagaaacaacccaccaaggagccgagaagaatttttgactcctgctgtgtgctggggactttatcttcccttgtttgggggccagaatggtccaactacttggtggacagggacaaggagagagagaggactcgtgcattggggaaggttgggcctgggtgactgtccagcttgtagtctctgattccctctggccaaatggcaaaaattacctgagccacagcccggctctaccacagttttccagccaaggcttgtgtcttgcctggttaactggccttggatccttcgtggggcaggacggtggaagagctgagaagcaggagcagagggcagacaacagacacccagcgggctcagttctcctcagcacagggcctggttggccgtaatcgttcctcggcccgtactcgcccagactctggcagcccctgcttcccaggcagttcagacggatccagggagttgtgcagttgcctgtagacactgagtgtacagtcttccccttcttcctcctgtgccaataaataacaaaagtgagctgtggaggtcagtaaagtgaggaccgagacaccctcacctgctaccatagtgggtcctttccaacccagcagaggcagatatagcccagacaggccataagttaactgcaaagatatgcttttgcctgagtatgggccaatatgtaaattccttggaaatcggcagactgggaactccaagctgctgggaacaatcagggtaggctaggaggaggctcacaactcaacaggagccttacagaggatagagcctggaatgggggcatgggactagcacccctgaggaggggccagcagtctccgagttctgcacatgcatgcaggccgcatgattctggggatgaggtccacatccttgatggggagctgaagagaggtccggacagctctcttcctccttcccacatacaaactaccaaaaagctcacattcccgtctctcatcctttatctctcctcttaaatgtccaaagcttcaggggcccaaatagctgtctttctccctacgcctagaattctacctttttttttgagacgaagtctcgcactgtctcccgggctggagtgcagtggcgcagtctcagctcactgcaacctccgtctcctgggttcaagcgattctcctgcctcagcctcccaagtagctgggattacaagcacgcaccaccacacctggctttttttttttttctttttttgagacgtcatttcactcttgttgcccaggctggagtacaatggtgcgatctcggctcactgcaacctccgcctcctgggttcaagtgattctcctgcctcagcctcctgagtagctgcgattacaggcatgtgccaccacacccagctaattttgtatttttagtagagacggggtttcactatattgtccaggctggtcttgaactcctgaccttgtgatccgcctgccttggcctcccaaagtgctgggattacaggtgtgagccaccacgcctggccagaattctacctttttaatattctccttggttctcccaagcaaatgcagatcaaagaataacataggcatgagtaagaaaggttagagtagaaagagcattggatttagagacaggaatcttggattcaagtcttcgctcttccagtaattctgctgggtgaccttaggtaagatattttgtgtttctgacccttagcttctacatctgaaaaatggggataatatctgcccccaggcagatattcaagggactgaataagatagtgggtagtgaagtacttttgtccagtgttaagtaccctgtaaagagtcacagggcttttcaagttaacagagtcatctgcttttttaaagaagggagcactgtgtccaggtccaagaagtttttcatcatcacaggtttctcatcaaaaagacactcccaggggcttctccagatgctgttctgacaccctgagcctcacactcacataaggcaggtggttctggatttatcaaagctgtaatgagctatactgaaccagccctgccctcagactgataatatgagacagacagctgtctggggggcaaaagaaagtgtcacttggaattgggtatacgcttatctaaaataggcccagtgtaagccccggctctcctcatccctgagaggccagcagcctgtgaagatctgctaactgaggcggccgagaacttgctgacctggctccccctcactgtgccctacagaaagggcaccgggcctcctcctgttgcccagagctccccatcagctgcagctgcttcttgtgcttttcatgctgttctgagggcctacggggagctcctttagctgctctggcaaaccaagggaagagaagacagatttcctttttatgtcaccttcatatacgagagcaaaatgaagacaacaaattggaaaagggattttggaaagtgatgctgccaaaaaccttctttaggagaaaggtcaaacccccctgatttttcaacagttctctaaggaacccagttctactcagttctcaagatcctgggtcacacaggccagagcagaggggaaaaaggaaaaggcaaagaaggaaaagggagggagaaaagagagaggggagagaggctggaactcaccatgcttgctgagtggttccaggctgcgacagtgatggtgtctcctacccgattccgacgggtaagcacctctgacacagtgaggctactttgggtccttctggaggagggctcaggggcatcccctgaacttggtcctacccttcgagtgccctgctcaaaaaggcaggacctgggctgttcgagttctgagaagtctgtggaagacctctgggtgtaggcattgctattggtagattccacgtttttacctattcgagttggggggtcttctaaagatttcaagtctcgcctactcttccaggcattccgcacagtaacatgtctggcatctgagaagcccacttctgaaggggcactatggcttttccacctgattgtctccgctggaggtgcatggctattcctctccacaggatccgatggcttgattataatgctgctccgagagaccactgtttctggcctgtccttcaggggcccatctgccattctctccgcttctgcaagctgcagggtgatgtcatgtttgtgaatggagagctcaaaaggggagctgacatggttgctaactgatgtgagctctgccagccccacctggatattgctagtggatgtgtgcctctccctcagggcctcacccggagcagctctggggctgctgctgtcagatggatatatagtaatgctacttgtcactttgtttggccctggtttggagacgggtttctgtttctccaacgtagtctctgttccagatcctcccatgatttttttcacatccttatcaacaataacaggtttgatgatggctctagaccgcaacgcctctctggggctaaagggcctttggctttttaccccagcaccattggtatctgggagctccatggtattggtggaggctctgacagatttcacagattcattctccattccagcatctttatcattctcaaatagggaggttctaggtgcccctcgggttttagccttttctctagagttaggctgtggtttgggctctggctctggagtgatggttgtatttaccaacttggcagtaacaagagatgctatgtccaagtcatcatctgagtctggcttctctctgccactggatttgatgactcgacacctcaaggcttcatgcggactgctgtcttccatcacaactgctgcaggttgattaaccccttctttatgtgaggttgaaaatccctgaaggatgttctcttggcttctacagctataaggatacttcgatagaacaggagccttggaattcgggcaactgttatcagcctcaaggccattggcagcctttttgcctttagagagcccttctgaggaggatcttcgagatgaggccagggctccaatggccttagaacagccagagtttgcagcctgagttacttgacttccgttgccaagcacgtgtcccctcttgccaaagacagtctcagaggaggtgtcagaagccttgtcagctctacccaatgggtcactgggaacagatccatgggtggtgtcactaaacgttcgtgttgtcttctccacttttcccttcagtccgctctcggtgcctggcttggaagtccccttccacgctttactgtgctcctgagcagccggggggtagcgactcagcactgagggctgctccctagacttcttcccttcgctctgggaggagccgggtacaaaccggtcttcagttttctttgtctcctgagtcccactgtctgtactcacccccatgtgagaagcttttgctgccctcctgttggtgaaactgggagaagaaacctgcctgttgctcagagaatagttttcattgttgagagcaaactccctgttccggagtcgttcccgcttatgctgaggagacagttcccgcgctgtgtgcttggacacagaagcttcacttccgtggcctctaaacttagtcctctcatgtctgcctttgctggacaggaaagcatcttccccttctacctctccattttctaactctttctgtttcttgatttgtagctttatctcctccagttggctggctaataatttgtttttattttgttcacttaggtaattatcctgaaggtcgttatttttggacttcattttcttaagctcttcttccaacgattcaaagtgtttgatttgtgtcttaagtttctcaatctcttggttaaggtctttgactttgttgtcttcctgattgcggttcttttcattttctgatttgtttcttgtttcattctctacctgctttaggtagtccagaccacccttccttcttgattctttggacggcagtgtggaagagatgccatcctcaatccgtaggtcatttctttccagattagaagcattccttgtataatctcggttcatttttttgttctgctctagtttttgagtgagttcttttatcaatttctcattttctttctccttttcattcaagtattttctctcacttacaaagctcagagttaatgatttcagcttttctaactctgacgctaaactctgctcagttttatccaggcggtcctcagaagattctagttctttcactttgactctgagcatttccagctcagaggagattttcttggtcagatttctctcctcattcaggctcagacacagctgggtacagtcattcttactcctgctgaaggcctcttctagcttctctaattcagccattcgtttctgaagccgctcaatctcagatttcagctcccgggtgaggttttcttcctcttcaagtttctccttcatcagacgacacagatcctctgctctcttaatttcctcgtctttgccttcaattctcagcacccgctggcgcagcacttcaatctccgccaacatgctggagttgctaccttctgcctgaatcaccttgtcctggagatccaggagttcatcctctgctttctggaggttttttgtggcttcctccaactcatcaaggcggcggcttagactctgtagcttaaaccgcaagtggcggctggaggccgtctccttgtagcttgtaaattcggccatgtctactgccagccaatgtgggctcctagaggcatccaattccactcaaggggatgagaaatggttacctttctcttggcaaccacaatcttctttgacagctggagaccatcatcaatctacaaaaggaaagtagaaagcatgtcagtcagcaaatgtaaaacctgcacgttagctcccagttatagaaaagtgctcctatctgttcctggtgcctggatcatagcaggggctcaaacctgttgaatgaatgacttgaataaacctgcaagaaaacactggttctttatggccgatattgagttgatacctcatttcgccctaataaagaatgtcaccagtggcagcatggcaaaaagacatataagaagcctcaattttcatggcagggtataataacatcattaccatctgcaacctgcataatctcaggagagtcattaacaatggaaactaagtctcagttttacttagtggtaaaatgggcataatgatgtctaccgtatttctccccagtgttgttctgagataatatgtggaagatcttggtaacaaagcaataaacaatcctaagatttttttttttaaagattatctcttatgagctattgtgacttaaaagtgatacaaattaaccctctgccttgctataaatggtgagcttcacaatatactaaaacaatctctctacacccattttcaacatctcttctcccaaaagtatatttgtaagtggaattcaggtgtgagttggcccgacccagccaacaggcagcttctacaaaacatatccttttgcactgtaaaagaaatgccccagatgttaaggttggtatgaagactggtttgtttctttgaaagccatttcactggggatatataccaaacatataataataccccaaggaaatagagaaaggggaaggtttagtttttttatgtaattttctcatttttaaaacaggagaatggattgataaatgtattttaaacagctttcatgaacaataagtcctacgaaattaaaaggcaaacaacagacttccatttccaccactacagcaaaccagataacctggaaaacctctaatactataaaacagctaaaaatactgaataaaatgtaacaatcacttaaaatgtatagttgatcacatagaaagtaagtgacattccagctaaaaccagaggaaaagaaaactaaatgaaaaataatagtaagtttaaactaccactgagctgtccttcttagggtcttgccgatctccagaaccaaggagtttgggttctaacaatcatgcaggtataagaggcaagagtttgggctcaatagaggtggtaagttgaaaatgagactccagtccccaatctaaagcaaggattattgaagaactacagctccaggataactagtgaaaaaagtcacctccctgatatagggagataagaggacccgggctctattaggggttaaaggaggattatccctagagaatttataatcttagacctgctctcacttgaattcagagttcaaatttataccatctgagtggtctagaacctatctgtcctgagaaactaacataaaatggccatcagcctagtaatatccctgggaaacctagctgagcaaacaaaagtactctggagggagccactctctacagaggtcacacaggattcccacagattaaagtccagctgaacctgagcttataactaaaaattacaaaacacataaagatccatcttttacttgactgggcagagcaagtcaagtaaaaaagaaccaaagttactaagattattggctagagaccatacaataagtacattccaatgtttaaagtcataaaagaaggaatgaaaaaaaaaaaaaacaggagaaaggaacaaggtgctatcaacaaagatcagaagatctgaaagttaactaaatacaacagctagaaacagagaagagaaatggcatattagaggcaaaggaagatattaatagtggtcaagagagatacgtaattacaaagagcagcacagagttaaaaagatggaaaaggtaaaagagaggttaacagatggggaaataattaaaaaggtccaaaacaaggaagttttaacaggcagcccaaaaggatagaatacagaatagggaacaggcaatatttgaagagctagcaggtaagaattttcaagagttgattaaagatatggacctcacattcaggaagcaatgtcccaacaggagaaaactaaatctgcacctaggatttaggatcggaagaatcctaaatcctcgtaaggatacggaagaatgtatcacaaacagaaaatctttaaaaagaaaaaagaaaaaaagaccattgtctcagtccatttgtgctgctgtaataaaatacctgaggtagtaatttataagaacagaaactggccaggtgcggtggctcacgcctgtaatcccaacattttaggaggctgaggcaggaggatcacttgaggtcaggagttcaagaccagcctgaacaacatgatgagaccccatctctactaaaaatacaaaaattagccaggtgtggtggtgcacacctataatcccagctacttgggaggctggggcacgataattgcctgaacccacgggacggaggctgcagtgagctgagatcgcgccactgcactccagcctggtcgacagagcaagacaccatctccaaaaagaacagaaattatttcctcacagttctggagcctgggaatataagatcaaggcaccagcaggtttagtgtctgctgaaggcccagtctctgcttccaagatgacacctagaatgctgtttcctcacagggaagaaggaatggaacaaaaagggttgaacttgctccctcaggcccttttttaaaggtgctgatccctaatactatctccttaaaggtcctacctcttaatgctgttgcactgggggttacgtttcaacacgaattttggaggaagcaaaaacatcccaaacacaaaaacaatctataataacaactgaaccacttctcagcagaaacttttaagtaggtggcaagtagaatggactacaggggataaggttgggagcaggaagaccaaataggaggctattgcagtaatccaggcaaaacatagttatggcctagaccaggatggtggcagtacatgcgttccaagagcacgtgaccaagacagttgagaaatggtcagaattctggccgtatgaaggcacgaccaaaagatctgctcttagactacatgtgaagcatgaggcaaagaaaggaattaagaagccgagtgcaatgactcatatctataatcccagcactttgagaagctgaggtggagttcaacaccagcctgggcacaacacagtaagatcccgtctctataaaaaaaggtaaaataaaataaaattagaaggtacagtggcatacacctgtagtcccagctacttggtaggctgaggcaagaagacagcttgagcccaggagtttaaggttccagtgagctatgactgtgccactgtactccagccagggtgacagagcaagaccctatctctaaataaataagcagatagacagatagatagataggaattaaggtagactctaaggtggctgggctgaatttgtagagggacagcattaccatcaattcaaatggagatgaccgcagatggagcagtctgagaaggaagatgaggagtctcatttgggacatgtgtatgagatgtatattagatgtataagggcccacttgaaattcctggtaatgatttaaagtgaaaccaatccacaaagttctttttctccagtcttgttcagctggctgaacagacaaaagaatagagaaaccagaattggactgaaccagatcgaagcactgcagaacaaagcaaaagaaggacaggagagcagaggatgtgtgtgagggactttaaattcactcagtacagaaggaggtgaagaatagtgaaaatataatagaaactaatgaagtgaaggtcccaaggggacttgaaggcttgttggagtaagggtaccaggtaccagaggaaactaagcctgaaatatagaagaaagaaatcagagagggacttcaaggaattgaaatcatggagggactgtagttattgataatgtcaaaaacgaaggtataatcataggaatcctgtgggggagtagggagaagtagagaacaagatcattagaagagagaaataattgagaggtaaaggtgttgcaagggtcaccagcatgtaagcgccataaattaacaggaataatgctggaaagagtgacgttaagacagaatctgaagttgttgagaagttaggggcagtgactcagggcgtcgacagacggcagcaacgatagagtattaggtgatgtcgtccaataagatcacatttaaaaatcaaggacaagagtgaagaaacagtctgagacataagagaaaaacagccaccactggagagggaagaaatgactccaacaatgatcctatgagaaagctcagggcaaaagaaaaacaactgaaattgggcctggaggagacgccaaatgccaattctctccaagcctgattcttctaatggctgcactataagcctagaaccaccagatggagcccaagctcagctcctcaaaaacaccaacgcttgaaggtgttgaaaaaaccaagccttccgcttccattcagattctgcccaccccgaatactgctccctgtccatcactctgcttctctgggtacatctttctctgtcctctcatctttgcctcttttggtcccccttctcctttccccagcctacctgcttcctcattctcaaaaacggagagggaaaaaacctcctatagtttatgtttttaaaaagaaagcttttcccttttaaaaactcttgcatttggccttctgcccagtggtacaattaaaatcttgtcaatgtatacacagggttggtttgggaggacttaattaagtttagaccacacaccaattttaaatgagtgtatgatacaaagggtctgtgttgccatcgtagtcattggaagacaaatgatatatgattcatctataaagtgctttaaaacagcatatcctcataaatatgcttaaaccattaaattgtgtattttaaagagataaacttcatgataaataaagcatatctcaataaagctgttaaagaaaacccagcttatcctcaaactgtagcattctctcagcacatcttatttgtactagcttatactatagttttcacaatctctttttcaaaagaaggaaacgttaaaccttagtatagccccatctataaattatcataattctgaattcagagagtctgggaattataccaccgttttatttatttggcttttagtgccaattttatatgttttatcaagactctggatgatatgaatcaactagtacaggcaatgaaaaagctaaacccagtaaatatgtagcaaatacttactggaaacatacagagaaagcaggtattacacaccactgcttaaaactctctaaaggtcctggctactattaggataaagtccaaattccccatgatggcacccaaagcccttcatgatgtggccccgccagcctcttcatctacatcctcgccctccctcttccctctggtccctcactagtttgattccttctcatttcttcagatcccactttagacaatacatccttctggaaaattctggagtgccttcttcaaaccccaggccagatctgggcctctcttttttgctttcacagtctgctacatatttcccatcacagaacctatcacactctattgcagctttatttactcaattcttctctccaacttgtgtcaccactatattctcagtacccagcagggagcctagcacacagggaatgctgaaaattcgatgaatttgactgatgagtgagcctcctaattatcaaatagcttgtcggccctttggcaatgaccattaacagaaaataataagaatgtccatgacctaatcatggattacaaaggagaaaacagatggcaagagtgaacagacagcacagaatctcaggccctgtggtaatgctctgaatgatctcatccctagccctgtgccacttgcacaatgtctcaaccacaattctctccccctgacctgctgggaagccctttcttgcaggtctatgccacacaaacaggacatagacatcaaaaaaccacaacactcacaggatgttcagctctagttatcggaccaaatgttggagaagtagtagaaaacatttctggatcttcctccactcctcagaatgagatttcagagccagaaggtagctaaagatcatttagtcaactggttttcaaactagactcagcaaatccccttggggtcatttaggggaaagacaacaggggagatattttgagcaggctgaactccaggctcctttcacttactcaaccaaagcaactgatttttagcttcttacaatattgggcttctcctatatgactttattaaagaattctacatagcttttatttaaaataaaatcacttacttcattcaaaccccttattttagaaacaaggaaacggactcagaagtaaatactgtgctttttccagcagtttagcaaaagtcaaggacttcagtctcctgactctatgttcaggattcttcccattatgcaaaatcacctccttataaactcttaagcatttttacaaaatgaggagttctaagcactactctataaacaaactaacaatgacaaaagagtataaaggaacaaataagtacaaccacaaatagggcagtactatactacaggcaatactaagtaccttatatacatgatttctgcaggtatcaggaatctcagatcatttactttacatgttcctacgttactccacggaggttttccctcaatgtccacacaaaaacaatatggtaatccctggacatgtaaaatgcttagcagaataccttgcacataagtcacaacaaacagtaagctactactattattctattcagctttcacaataaccttatggggcaaggactctcaaattttcccaaagtacgcagctagcaaggacagtcagagtgaatctaggtccaattccaaagtttatattcttttaagaataccatactgtttggccaagtcactgattttctctatgctttagttcctctgaaaaaataaaagaatatcaactaccttacagcaacactatgcaataaagttagcaaaagcactttgaaaagtcctatgcatacctaaagtaagtttcatcagggaaaatcctcctaaaaatagtgattcactaagatcatcccttctccccagagtaaacaaggaactagactgaaaatggggttaggaggtcacttatctctgaccttttggccctaagtagccaggataagaaatgctttgctacctcctggatcatccaaaagcaaagtagacacctctctttctactgcctcccttactctgtgttaagtatgtttatccaggcaaaattcatttatttagcagacatttatagaacacctatgatgcacccagcattttgccaagataagtagaaaatcttacccttgcctttaaggaatcatacagatataaccaatcataaaactatgataaagaagccttccctgaccatcttacataagatagcacccacccttttgcatcctgtcttctatcctgcttttttttttccttagcatattgtatcatcatacatataaccggaagctcagaagaagtgattaaatgtgcctaagggtggggtctgggaaggaaactgtttatattaaaccttgggaaaccataagaaggtttttacaaagggaaggacagtctcacttttcatgccacccctacattagtacctggctcagttctaattcacgctagcaacatacagtgccaactgtctctcattcagggctctttctatcaaagttcctgaacccagttccaagtggccccatccagcattttggagggtggctcttcttcctgtcctggcagatcaggaaggtctgaaatagaacataatcaggcctgccctgccccttctcccaacacagctgccatgattcacttcctgttcccaatagtcatttaaagaggggtcggcaaacttttttttaaaaagtttgatagtatacacataagtatgcaaacttagtttgagagtaaatattttaggctttataggatctaaggtttctattccagctactgaactctgacaatgtagtgatgaagcaaccacatatatactgtacagaagtgaatgaacataactatgtttcaattaaacttgatttaaaaaaacaggcagtgggcagggcatggtagctcatgcctgtaatcccagcactttggtaagatgagcggggaggattgcttgaggccaggagttcaaggccagtcttggcaatactgcaagaccctgtctctacttaaataaaccattaaaaatttaaaaagcaaaagacagtgggcctgtctgccagaatttgccaatctctgatctaaaggataataggagcttttattttattttatatttcatttcatttcatttttcatttcatttcatttgatttcatttctttttttattgagacagggtctaccaggctgtcatgcagtggagcaatcacagctcactgcagcttctaccttctagcctcaagcaatcctcccaccttaagtctcccaagcagctgggactcagacacatgccaccatgcctggctaatttttctcattttttttttttgtagagaaggggtctctatgctgaccaggctggtcccaaactcctggactcaagccatcctcccacttcgcccttcgagccttctaaagtactgggattacagacgcgagccaccgcccctggccaagagctattttcaagcagcttcctcctgaccacttgtagttacctgttttaaaatcttaggctgtctaagcctcaccatcaactcttgcacatttctatctaattacagggcttacattatttttcccagaatcacaaattcatgtattttggatacgcaaactcaagagtgagggacccagctagcatacagagattcttcatgttggaaaggatttagagatcatctagtccaacctcccactcaatgcggacgttatctagcaagtagttactcagcttccgttcaaacacttctaatgacaagaatgacagtcacttcctcccaagacaactcactccatctttggacagctctaaggtaagataccctacttatttttcttcttggcacatttaaccacctgattacttgtaaatttatttacattgattcttcttaccagaaagtaggatgcatgaggtcagaagtgtagttttttgtgtttgtaatttttttattgctgtattccccgccccttgaacagtgcctagtacataaagagtataatatagttgtttattgggaaggagggagggaggaagagagggagagagggagggagggagggagggagggagggagggagggagggagagagggagagagggagggaggggggaaggagggagggagggggggaaggagggagggagtgaacaagctaacaaaacaatgctgtattcggggaatttaattcagcatggctgacaccagagacacaaggggaagagcaattaactggtaaggtctctgtggtaggtttgaggcccctgaaatgtcacagtaagttcagaggctgagggtgtactgtttgaggaacattcccttatctcctttccttccaagcccccacaacccacagccattccgatggtaaacatctttttttctttttctttttttttttttgagacggaatctcgttccatcgtccaggttggagtgaagaggcacgatctcagctcactgcaaccttcgtttgctgggttcaagggattctcgagaactgcctcagcctcccgagtagctgggattacaggtgtgcgccaccacgcccagctaatttttctatttttagtagagacaggtttcactatgttgccaacactggtcttgaactcctgacctcaagtgatccacaagcctcggcctcccaaagtgctgggattacaggtgtgagccaccacgcctggcccaatggtaaacatcttttaatgcatctgttctctgaggccttttcaaaccatccttccccgcaagagaaatgcaccatcctaaattctgtagatgcttctatcactatatccatgatacttaaaatatctgtcatcctctgctgggctctgagagcagggactgtgttatcttcatttttcagtcctgggcactgaatacagtgacaggggcaaggtaggaaccttataaatgttttgtaaataaattaatgtaatagttttattgtattctgtactggccaaatttacataaaggggactattttcagatctaggcactacattctaggaaagatgcttagcctttatgccagaggctgaaatgcaggtgccaaagagatcaggccaatgatttaaatgagttaaagggcctagaaggactatggctaagaggggctatgccctacttttatatataatctcttaaatgtagccaatgaattcagatttcaaaaaagaggaaataaaaagaataccactgtatagtccctccaaaacatacatgcctgcaagtggatatgggaagcaaatttgcaacctgtattggacaaagggattaagtaagagagtaacacaatcagaactgcagtttttgaaaggccattctagcaggataaactagggtgctattgtaatagtcaaggcaagagatgggataagggcctgaaccaggacagtagcaatggggtaaaagggtgggatggatgaaagatgacctggtctgcccagttctaataatgaagtccaagattgcatgaacgaatctgatagccacagtaccaatttgtaggttcatactggctttgtttccaaataaactgttaaatctcatttttaataattgaaatatggggcttaattcttttgcaggcaacgtgatacaatgattaaagtttacgaactctgaagccaggcagcctaagttcaaaccctgactttattagctactagctgtgtgaccttggataagtcatttgaattctctatgcttcaatacctataaggttatggtatgtgtaaataagttaatgcaagaattgcttagactagtacctggtctatagtaagtgtcatgtaagtttcagcttaaattattatttattatttttggatttcaacttcttagtttcaatcccttgactaaatattctctacactgtctagcctgcaaacattcgctatttaagtctcataggcatgtcttttctatatcttcatccaaattgatgttcaaaaacaaaatataaccaaaatcattaaaaacacctcctatagattaacactgatctattacaattcctgagtgcaactattcaagaagctccaaagccaggtaaaatttttttttttgtcttgggatcacatgagaaaacattaaatacctaatgttagcacttaagacacattacctttgtagcacattccaatcctccagcgacctaggaatctttccaaaaatgaaatgctctgatatatatatcaaactgctatatggtaattatctctggataatgtgctttttttctgtttttgcttatgtctattctctaatatttttatactgaacttgtaccgatcgtttaaataaaatcatggcaaggcttaaagaaaaaaaagaattgttatcagctagcatgatttattcttagtgaacacaagctggcttctagggatcactgttctcattctttgatcaatcaattttagaattttaccagagatcactgtcaagtttccaatgacatcctcaaacccctgtgacccagacgttaactccaaataaatcaaacacctctcaaatgggcacagtggctcatgcctataatcctagcgcactttgggaggctgaggcaggcagacagcttgagcccaggagttcaagaccagcctcggcaacatggtgaaaccctttctctacaaaaaatacaaaatttagctgggagtggtggcatgcacctgtagtcccagcttctcaggaggctaaggtgggaggatcaactgagcctgggaggtcgaagctacaatgagctgagatcacaccactatactccagcctgtgtgacagagtgagaccctgtctcaaaaaacaaaaccaaaaatttaaattaaaaaaaaatcaaacaggtctatggggagaattagaatttgagagccttcaaagtatgtctagaagccattgctttctggttagccaccactaccacccaggtccaacctaccatcatccctgccctggactactgattactgcaaaagcttcctaacttgtctccctgctcccatcagtgtccatccttccccaccctccacagtctgttctcccacaacaaccagagtaggccttttaaaacatcagtcagatcaagtcactcctctgctctaagctctttagtgcacctcacttagaatacaatgcactccaaaggtgtcacatggctgtaaggccctacatgatctaggtcccatcactcatctgctgctccttccctactactccaatccagccacacggcctccttatgggtccttatacatgaccagttacactcatccctcagagattttatacctgctgttccctctgcctaggatgcttttcccccagatatctccctagctggactcctcacttcttttagatcttagcttaaaatatcacctcatcagaggccttccttgattgctgtacataaaggagcaatccctcagctccccaccactatcaccttacgctgcttttttgtcttcttagcatgtactatctagtggatgttatttgtctactcacctgtttatttatttatatctaattattcatttttatctgtttccacccattagaatataatccttgagagaaaggactttttctattttgtttaatgcagtatacttagttccgataactaaagcgtgtagtaagtggccattttttgtcatcagaacattagccccagtatatagcaaaatattttatgtgtaataggtatgtgtaggctgggtgcagtggctcacacttataatcccagcactctgggaggccaaggtgggcaaatcacctgaggtcaggagttcaagaccagcctggccaacatggtgaaaccctgtctctacaaaaaatacaaaaattagcccaggcgtggtggcacacacctgtaatcccagctactcgggaggctgagacaggagaatcgcttgagcccaggaggaggaggtttgcagaggcagtgagccaagatcgcaccagtgcactccagcctcggcaacagagcaagactacgccttgcaaaaaataaaaaaatacagggcaagagtttgccttgaatttttccactccttcgagaagagttctgtattatccctaactacacctatttcctcagaggggttgacatgagagcaagaggctttgttaagattcctttcctatgcccagtcactgctatgacgagaacccatttcccactcattctgagctaccctattgctctactttcctagggaagctttctctaactatcatccagctatcaggagcaaccaagaccaccaggtctcttggccactgaccgttcaagttctcacttctatctcttctatttcattagtgctctcctctgccttagccaacaccaaccaataaaatattggcacataaaatccataaatggctaggaaaagaacctaattgttgatcaaaaggttttgtattttgctttgcttttccaaggttaaatcagtcacagcctcaaccaaaaagtaactttcttaaaagggaaacattatagtgtaatgaaaataacccactagggtggtggctcatgcctgtaatcccagcactttgggagactaaggcaggaggactgctttagcccagcagtttgagaccagcctggacaatacagagacccagtctctacaaaaaaattagctgggcatggtggtgcacacctgtagtcccagttactagggaggctgaggtgggaggatcacctgagcccaggaagtcaaggctgcagtgagccatgatcacgccaccgccctccagcctgggcaatgggagcgaaacccagtctcagaaaaaaaggaaagaaaataatgcaggtttgaaacctagttctactacttgtgtgaacttggaagagttatttaacctctttaagcttgtttccttgtggtgatgacaacagtacttacctcacagggttggtagggcgataacatgtccaacaggactgcgcccgacatagagtaaatattcaataaatggtagctacttcttaagggtggcctaattcttacggttgctaacttcatgcaaggatttttcaccctcatcaggttggttggttaagtactcagcatagtatttggttcataataggccatcacaaatactgactttcctccccacttccagtagtggcaaaattatagtggcttcagaaaccacccaattctattggtacacccaggtttcactgtacaacatacttaccatgtaggtaattcaagctttccgtcaatacttccggcggctctccctatgcttgctgttttggaaacagtcactcactctctttcaaaggcagttgtctcttgacctggatagaatataaacagaatggaagagataggtaatgcatgaatcataccaagactgaggtgacccagagggctgtcccaaagactttcacatacaattcactgtcagcaaggggccaaggtaagatctgcatctagatcctgacactaaaggaacctggctaagctggctatgtctctctcaggaaagtcaagaaagaatttggctgtaggagacttcccctttcctataagatgatatggtcctagggtagaacccactgtctttgcttaaattaaaacacccgaacattcctcaacagtctaaaaatgtacatgacatcttacagctaggaagcatctcagaaatcagctacaggttgagcatccctgatctgaaaatcccaaattcaaaatgctccaaaatctgaaatgttttgagtgcccacatgactccacaagtggaaaattccatacctgatctcatctgataggtcgcagtcaaaatacaggcacacaatactcaggtttattcaatgtcccctggggaaaaataaaattaccttcaggctatatgtataaggtgtataggaaacataaacgaatttcatgtttagacttgggtcttatcccaagacatgtcactgtatacatgcaaatattttttttaaaaatctgaaatctaaaacacttctggtcccagggatttcggataaggggatactcaaccttcagttaaatgtccttgttttacagaaggaaactaaaacttagaaagggtgagtcacacaattatttagcagaaaagcaaggattctactaaaaataagatgttctagaagataggaaaaaaacatctgcggagtatttaccaaccctgagcactatgctttatgttttatataagacaataagaagataatgttacctctactttacagataaagaatttaagtttcaagaagtgacttgtccaaggtcttacagcttgttattaaatgacagagtttaaactcaagtctgtctgactttgaaagtcccttcaccatgctggctctcattttgttgccctctagactcggtcctcaaaagagccctgaaccacccaatatcaattaaaactaaaaatagagcttttctttctgcaaacttaccctccagttttgaaacaagcaggcttctacaggagagttgaaaagcctaccatcccattgaatcttacccctaaaattagagaagagctactacagatggaagatctgggtcaaacttcttgtgttatcttactcttgaggaaaatggaaaggtagcttctaagctagtggtaaacctaaagcttttgtacatgatcttacaaactatcctcccttctttcatcacaactgcctcccttacacatccctgcaagccaccttgtgactgccttccaagactattggtccctttaatccaacttccacacctccaccaaaacatgcacacatgcacacatacctgcacctgcgcgcatgcatgaacgcgcacacatacacacacacacacacacacacacacacacccatccctgcctctatcttcccagagagcaaggcggctagaattacaatggacaaataatgagagttttttaaaaacagcttaaaagatgaggggaacagtagtaactcaagcctcaagagaataaaatttgaaaagaatttttttttgtagtgatggggtcacactatgtcacccaggctggtctgaaactcgtgacctcaagcaatcttcacaccttggcctcccaaagagaagagttactgatagtatcggccaggcacggtgactcacgcctgtaatcccagcactttgggcggccaaggcgggcagatcacctgaggtcaggagttcaagacaaccctggccaatatggtgaaaccccatctctactaaaaatacaaaaattagctgggcatggtgacatgtgcctataatcccagctactcaggaggctgaggcaagagaacctcttcaaaccaagaggcggagtttgtggtgagcccagatcgcgccactgcactccagcctgggcgacacagtgagacgctgtctcaaaaaaaaaaaaaaaaaaaaagttactgataataaaaacagctagaaaataagtataaaaaaggatctaggccaggcacagtggctcatgcctataatcccagcactttgggaggccaaggcaggaggattgcttgaacccaggagttcaagaacagcctggacaacaacaaagcaaggcccccatctctacaaaaaaaaaaaaattttaattagctgggcatggtgatgcacacctatagtcctagctacttgggagactgagacgggaggatcacctggagcccagaagtttgaggctgctgtgagccacagttgtcctactgcactccagcttagatgacagagtgacgctctatatttaaaaataattttaaaaacgatctataccaaggcggcacccaagagatagcttaggtggatgtgggggaagctttagctctccaccctctgcttttaaaaaataatcaatggaagttaaagtaagtgtgattggtattcaaatagttttaggacagttccacagactttccgtcctaccccatcaccacctgtctctttccccctccccacccaccttacacacacaacacccacacacaaacaccgcccccccacacacacactcatcttcttctgcatagcctaaaacctctcctacataaaaattctgaactctaagaaatggtcacataaatctggtctatctcccctaaggtctctgcagccctaacagtgatagcagcgcccctgctaaaatctactgtcccagcacctaccacctactgccaaatttgctgacatgttactaaggcccaggggcttttctcttcaaaacaagacagaatgcactgccaaagggaaagaggaactccagctaatcctgatttgttttcaactgtctacgttctctcatatttctaaggggtagaagtaagcagtaactgatttctttcttctgaatgccatttacttcttgcttcctcagcgtacttgccctctgtccccaaaacaagaggatgactgtaaacatcctcaaattccttagtgatgctgcttcagagagctttccaccatgacagatccatcctcatcacttccctcaagcatctcttctggcacttattgtttctgttactgttggtggtgatagtggtggtagtatgtgtgtacgtgtctgtctgcctagaagcagagactgaaggatccttacagatcacagagtccaaccacctcctttcccagaggagcaagtgggtcccagagaggaaaggagacttgcccaagcttacaaaacaagctcaagtgaacatttttgtcccccaaacactttgataatagataaaaatgtcagtaagaaattctgctttcagtatgaccctcccacagacaacaactatactctggataaaacacaaaaactatctgaagtgaacaagggctggcagattttgaaaataagttgaaagttggaagaaagggctgacatggaatgaactcctcatttttggatctctagcctgaggctggtctagctgaagttccaatcaaaaaacaaaccctaggctttctgtcctgaagaaatagcccagagcagccacagatcatggaagtaagaaaaaaaagagctagaaaaggagagtctcaggttctgtgtgtaaattctacccagtctctggctgaaccctgagccatgcaagcatagggcagaatccaaagacctcagttaaagagaaaagaactgaactgaaatttgaactgcgacccactgcaggtgtgacagagtttgcagttttgagtctgagttattgtctactaaattaaaaacatcaacagaaaccaaagtctccacaatacaacattcacagtgtgaagaatacaattccaaattacataaagaactagaaaaagcatctggacacggtggctcatgcctgtaatcctggcactttgggaggccaagacaggaggatcatctgagcccaaagtgtttttgagaccagcctgggcaacacagtgagacactgtctctacaaaaaatgaaaataaatttaaaaaaattagccaggtgtggtgatacatgcctgtggtcccagctacctgagaggctgaggcaggaggatcacttcagcccagtagtcaaggctgcagtgagccatgtccacaccactgcactccagcctgggcgactgagtgaaaccctgtctcaaaacaaaacaaaacaaaaacaaacaaacaaacaaaaaacacctagaaaaattaaacccatttgcaatttgcaaaggaaaagacaatcagcagagggcaactccaagacaacccagatgctgaaattctcagacaaagatattaacagagctattataactaagatcaatgaggtaaaagaaaatatgctcaaggccggacacggtggctcatgcctgtaatctcagcactttgggtggccgaggcaggcggatcacgagatcaggagatcgggaccattctgaccaacatggtgaaaccccgtctctactaaaaatacaaaaattagccgggtgttgtggcgcgcgcctgtagtcccagctacttgagaggctgaggcaggagaatcgcctgaatccgggaggcagagcttgcagtgagccgagattcagctactgcactccagcctggcgacagaacgagactccgtctcaaaaaaagaaaaaaaaaaaagaaaatatgctcaaaatgaaggggaaaacagtaaatctcagaagagaaactgaaaaaaaaaatttaagtggaaatttttgaacagaaatacagtatctgaatttttttaattcactgaatgggcttaaggacaaaatggagatgacagaggaaagagtcagtgaaatgtggaagcagaacaatagaaatgattcaaactgaaacaactctgggtcattctcagtctctagaaaaaccaccctcagaccctttactaaagtatacacagggataattttctgttatcagaaaaattggtatcagagagaaacagaataacttgggatcacagagttttctagtggtcctaaattatataggaagcaaggggaaaataattttatttttcctcctataattgctgaagtagcattcaggattgttcaggaaaaaagccaggaaggattttaataatttttctgccctgtgcagtctcttcaccaaaaagccaacatggtaaacaggccgatggcaggatggggtggggaccaatcagggggtatggggctaaggaagtgccagcagcttgctatgtatgaaccaacctaggtggttttaaaagcagcttccctgaatgccatcactgactgagtcgcttctcacattcaagtcacttcatgttggagttcagaacactccagataaaagtggaagaaaaaacataagctgcagaagacatgtcaatttctttaaggcctgccttttgctcacttccctcctcccaaccccacttgccaacaagaaggaatgaagagaatccagagccagtgatcttttctgactaaagcgggaaactgagagtaagacaacgcaccctctaagtgtagagaaacttggatggggagtgagaaacccgggtggcggcctctagttctaccacagacattgttggacctcagatgtgtcttttacactttctgggtctcagcttcatcagtcaaacaaaaaggccagactaaatgatatttaacaatgatatactattgtcctttccaataacactatgaatgacatccttaaccatgctatctccatttgcccttgtagaaactataaacaggtccgaaaagatctaagtagaggcataccatttgattaattggagtacctcatgttatataaattattcaaacttttttaataattttctataagtcttgccattaatacttaaatcgcatcaataatagatatttcagtacctatctatgatagaggactgctgtaaaataatgtctttcaactgaaagtgcttctaattctcccagaataactttttaaatctacgtaacctttaggatgagaaggcaaatactcttatctcatatgacagatgagcaaacaaagggacttctgagacctttttaggaagctagtaacagacaaacaaaactagaatccagcaatcccatctctatgtgtcaggttatttttcaccttgccaaagaaaccttaccaaagaagagtataaacaagatcagaattagaaagaacttaagaacttttgtgcactttgggagtgcttattaataaataattgataaaactaggttgagattaatgtatctatttgaaagctggcactcaaagaaccggctctgctacttcctctttttttttggagacaaagtctcgctctgttgcccaggctggagtgcagtggcacgatctcggctcactgcaacctccgcctcccgggttcaagcgattctcctgtctcagcctcccgagtagctgggattaccggtgcatgccaccacgcccagctaatttttgtatttttagtagagatggggtttcaccatgttggccaggctggttctcaaactcctgacctcaagtaatccacccacctcagcctcccaaagtgctgggattacaggcgtgaaccaccacgcccggccctgctgtttccttttctaaccagtggtctacaattgagactaggcttccttgcccatgtttgtgaagtttagcaacagaatcacatctaaaattgttattcacctacggagagaaagttggccaaggccaagcacagtgcctaaagcctgtaattccaacattttgggaagctgaggcaggaggatcactcgagcccaggagtttgagaccagcctgggcaacatagcaagaccccatctctccaaaaataaaaccaggccaggtgcagtgactcacgcctacaatcccagcactttgggaggctgagatgggaggatcacttgagctcaggagatcgagaccagcctgggcaacatagtgagaccttgtctcttaaaacaatttaaaaattagccaggtgtggtggcgtatgcctgtagtcccagctactcgggtggctgaagtgggaggatcacttgatctaggagactgaggctgcagtgagtggagccactatactccagcctggacagagtgagacactgtttcattggccaggcatggtggtatatgcctgtagtcctagctactcagtaagctgagacgggagaattgcttgagcccacgtgttcaaggttacagtaaactatggtttcatcactgctgggtgacagagcaagaccctgcctccaaataaataaatgaatgaaagaaagttggccaaatcagaaggtgtaaaaaagtaaaagaccactggactgttaaaaaaaaaaaaggcaaagagaagaaaaaagagaaaagaaaaggaaaagaaaagaaaagaaagaaaagtttgcctgtgtgaaagtgataaggaaaatgtagagttgaggatcagttttgttgttatttttgtttaatgagggtactatcctagcactgtctgtcacatgtacgagctgcaagtcttaggaggtgcaagtcacccaaaggtttcgaatctttttaccttcacactcaactcagagaatgtgacttcccttgtactgactgttaagtgcccagagcatcaatctagaagttttttgttttacatgcatctcatctcccttaggagaagtgtatctcatctcttaaaatggaagattaaaatgcccttctatatacttggtggtatcagaagaagaatactaagctgtacctattagagagcctgagtgaaaaaggttttctgctgctattttaatttgaaggcatattttacagggtcactattatttctaccccctgtaacaagtttatttccattttattgcttctagggaatttccctttgtctctattccacactctctctccatcctgcctgctgccctggcaacatgctataagggaaaaccacacatgggattgaaagtcagattatctgggttctattctaattcagtcacatattactttaagtgattaaacttcacaacctcagtttccacaactgtatatagagattacatctaaacttcatgggactgttgtaaggattatataaaaatatacattaaatgcctaagcacataatgcctgaacgaaaatataccctacacatattaattcaattttcttttcatcactgtacacattctttttttttttcctctctctctctctctctctctcccccccccccccccacaatcaggaagccctgggggggggggcggggggggggaacaccttgagaaagtaacttgcccagttacagcagaaataattttaaataagtactaagagaggtggatgggtggggccagaggtataataaggcagcatccaaaagggcaaggaagatgcccaagtcagaataatcaggctctgtgccagttctgcctcccacccctaagccctaagttccttcttgtagctataactatgtctatctccttcttttactaagtcacacttgccaacatgtctcacgtcaaagtctacattattaaaaacaaacaggaggctgggcacagtggctcacggctgtaatcccagcgctttgggaggccgaggcgggcagatcacgaagtcaggagttcgagaccaacctggcaaacatggtgaaaccctgtctctactaaaaatacaaaaattagccaggcgtggtggcgtacgcctgtagtcccagctaatcaggaggctgaggcaggagacttgcttgaacccgggaggtggaggctgcaacgagctgagattgcgccactgcactccaccctgggcgacagagcgagactccatctcaaaaaataataataaataataaataaaaacaaacagtcatggtggcttgcgcctgtaatcccagcactgtgggaggccaaagtgggtggatcacttgaggtcaggagttcgagaccagcctgatcaacatggtgcaaccccatctctaaacacaaaaattagctaggcatggtggcacacatctgtagtcccagctactcaggaggctgaggcaacgagaattgcttgaacccgggaggcggaggtttcagtgaactgagatcacaccactgcacttcagcctgggcaagagagcaagactccatctcaaaaaaaaattaaaattaaaattaaaactcactcacattcacacaccaggtagtacaatgggcagtagaatcctgagttctactcttgtctctccaacttactagaatagtttcctcatttgtaacacagaaatgacaatgtgtcttgactacaagattataaggaccaaacagaagaatgtatgtgaaagtactttgtacacaataaaacatggttattgtcataggtacagtgggtctacctttggccagtttaggtgttaggttttactttaaaaaggcctcagttctacaatactctatttctgtgatccaaggctgcctatttccagttcaagtcctcttcttcctggcagctgaaaattttatattgtcatcctaatttcacttgattccctgatttttgcaaggttcctcaaatttctctaaccaaatgggctccatgtctccaaaatggtaactaaagaccactagaactgatcacctctacctgtccttttggttctaatattctaagattcttgggcctatgttcccaatgcactttgtctgtatctctacttgagcaattttcttagtctactttgcattacaggtttatctgacaccatctcctaaagaaaaagccacaggtaggttgtcctatgttgttttatattccccgtagcaattaacgtggagcttcacaaaagtattagttgaattgacttgatgctaatttctcatttttttatacttactatccctactacaccataattatagaccaccttattcttttgtactgccattggcctggtacagtgtgaaataaacagtcaacattttttttaacgacctgatgtgactagctctttttttttttttttttttttttttgagacagggtatcactctgttgcccaggctacggtgaagtggcacaatcacagctcactataacctcgaactcctgggctcgagcaatcctcctgcctcagcctcctgattagctaggacataactgaaagtgaaagcaagtatgacaactcagatcttagttttagctttaaaaataacaagctatgggtgtgaccttaggcaaactgcttcatttctccaggcctcattaagatatctcttacaacttttaaacaaagtctggagaggatgttgagaggaatcaagtaagaataagcccttctgaaaaaccctaggtttatctctagtatagcacttatcattctgtattataattgtctacttgttactctcctgtaccaaaccccgagctcctgaaaggccagaattatgtatttcatctctgaatccaagcatgtgcatagaacgtggcacacagtaacagttcagtaaatgttcaatggccaaactactgaaaattataagtgcctatacttacgaagactcttatgtataaatggacttatataaacttataagaaagaataattcatctccctcatgtacaaccctttcaaataacattaaataaaagtatttttcttattatcaccagctcaagtccaggttttgttttttgttggtagttttttttttttttaaagacagagtcgtgctctgtcaccgaagctggagtgcggtggagcaatcgtggcttcctgcagtctcaaccccctggactcaagcaaatcctccccgctcagctcccagagtagctgggactacagggatgtgtcaccacaacaagctaagttttgtaagttttgtagagatggggtttcaccatgttgcccaggctggtctcaaactccagagctcgagcaattcacccacctcagcctcccaaaatgctggaattatagacatgagacacggcaccagcctaggaagtccaattattgaatgcccagaatcatctgaaattcaggatccctagaagatatcctgacaagggcctcagaagtgcatgcctcctacgctctaaataatatacctcctaataaataaataaacatatatatatggagacaggtctctctgtcacccaggcaggagtgcaatggtgcaatcatggcttaatgcagccttaagctcctgggctcaagagaccctcccacctcagcctcccaagtatctgtgcaccaaaatgcccagctaattttttttatttttatttttttgtagagacagggtcttgctatgttgcccaggctggtcttgaactcctggcctcaaacgatcctcttctctcgacctcccaaagtgctaggattacaggcatgagccactacgcctgacaataatacctaatgcttatacattatttcatagttcaaagcactttcacatccatactctcaatccttaataatgaccccataaggatattatcaaattcattttatatgttgaagaaattgaggctcatattttaaatactttgctaacctaaggcaagctgatatcaactaaaggagggctttcatatttagcctctcttgcttcagtgcccaaaagaggcagaaacaagaacaccaccatctccactcccctggcctctacaaacgaggtggatcagaccactatctgctattgctttactgagctgactacctcttaagtttttctcgtctccataaaaatcagttacccagagtattttattatgtcttaagcaaaaaataagaccagcccagggagaaaaatccccaagattacaaacaaccacatttataagctgctggcttatatctttataaacaaagctaaaaaaataaggggaaaacctgctccaatggggagctgtaaaccctactgaccaaacagccccttggcacttaggtaggtagttatatacagctaatttagtctgtaatagtttttgtacttcttcaataatttgtactgcctattgttttctccataccattctaaatgcctcaagagcagagatcacatcttctagttaatttacatctgttcctgtacaatgaccatatagtacccaaaccaaaattggtttttctggcctagaaatttatataaagtcttatccaaatttaaaaattaaaatacataggctaggcacagtggttcatgcctgtaatcccagcacttgggagaccaagacagaaggatcacttgaggccaggagttcaagactagcctgggcaacatagtaagaccttgtctctataaaaaataaaacaaaattagtcaggcgtagtggcacacacctgtggtcccagctacttgggaggctgaagtgggaggatagcttaagccccagaggtcaaggctgcagtgagccgagatcaagtcactgcactccagatgacagagcaagaccctgcctcaaacattaaaaagtagtctgggcatggtggctcacgcctgtaatctcagcactttgggaggccaaggcaggtggatcacctgaggtcaggagtttgagaccagcctggccaacatggtgaaaccccccctctactaaaaatacaaaaattaactgggtgtggtggcgcacgcctgtaatctcagttactcaggaggctgaggcaggagaattgcttgaacccaggaggcaaaggttgcagtgagctgagatcataccactgcactccagcctgggtgacagagcaagagtctgtcttaaaaataaataaattaattaattaattaattaattttaaaaagactttaagtaattgacattcttcaactgagtaacatttataaaatcaacagtttctaataaagaaacaccaaaagacacttaacacctacaatggtgccaggcatacatttgagtgggcactcaataaagttgtgctgaatgaatgataactgagagcttaaaatccattaaaaaccacttaaggcagaataaaatatccaggacaagagccaaaagaaatgactagagactgtcaagttaattggaaaaataagattctaaggtagttccactcaaagtcatacttagggtaccacaagtgaacactctggattcaagcaccacattatatgtacagccagagtgaatgcattagggcagtgacttagcacgagggttctctctgctcagaccagcagcatgcaaccagcagcagcttgccccttcccccagttagtccccattaccaacgccctgaagcctagtcacagaactacagcagttaagccaggcagtactaaaagttagaaggaaatgagcatgccacctgacacttttctggcacaggctaagccgattagtttaggttacaaacacaactacaagattccaggacactgaagaaactactctttttctgcaaactaaaaataacttattaaaacgggagtgttcttcaagtatttctgccctgccagcaacccaaagttccatttcctcaaatccttcttagtcttattggatccaagtctccacacctcccccatcttcccaactcttcatcctaatgctatgaacacagtaaaagacctaaactcctttcctaactcatgcttttaacgtttcttttctaataagcaatcgtgcagaacttctatggctcctgccttgtgtagaaccacaactggaagacatgctgagcttcagcaaagaataatgaaaaacaaagaaaaactgaaggacaagatgcagcatgctcgggaagtcagctaaatgcttttcattcaggcaggaatagaaggagcctcacctacctagaagaatacagcataaggacaaatggtgtctagtatagagctagactatactttatcactttagaacaaagccatcaagcgtgttctagagacagactcatgtccaaatagctttagtatcctataagaatcattaggctggccgggcgcggtggctcacccctgtaatcccagcactttgggaggccgaggcggggggatcccgaggtcaggagttcgagatcagcctgaccaacacagtgaaaccccgtctctactaaaaatacaaaaattaaccaggcgtggtggtgcatgcctgtagtcccagctactcaggaggctgaggcagaagaatcacttgaacccgggaggcggaggttgcagtgggccaagatcacaccactgcactccagcctgggcaacagagtgagactttgtctccaaaaaaaaaaaaaaaaaagcatcattaggctatctcaaggttgaagtgacatttttcagggttaaacaaactcccatcatttaagccaaataaatcaagattgaattgcagactttctggtcatacagagctgagagaaggactcaaatcctactactaggaagtggaaattccaaggaagctagaaaaccctgtcctcagtagctctccctgctctcaggccctgaggtaagccagcatttcctttccaaggtcaaaaattaaccatagactttgaacatctctgtgctttgcaacagcaccaggaaaatgccacaatgctaagccaccctatatagacctaagacatttgctattcttgattattcccaagagtagtcacttgggatactcattaatgtactttctaaagatccaactttcaaagtagtcttttctcattcttatttttaacctttcaccatctctctttaaaaaaacaaaaacattcagatgtcttagagcactgaagaaaaagaaaacaaaaattggcttatctatataatctacactctcagaaaaattcctcctgaaaaaaaaaatttttgccctaagaccacccaaggtacacaccatggtaaagtttcaatgcagaatcatgctgtgagcaagagcaaatggaaagctgcagcccttcatcaaacagcattagaaccttccaagattcgtgaaatcaaagaatatcagagctggaaagatacttagggtgcaataatctagtctagcctttcattttaaagatggggaaaataaagcccaaagagaggaaacggagtcttgaagcaaagctggacctaggacctaagtggccagactcccaactctggtatcttctgccacaccatacctcttcacaagactgactttaagggagtcaagtggctaaggacagggtaggcaaaagaaagtaaacatatggtaccaagcaaagaaaccaactctctgtgaattctcctctgttgctttgtggtgtgactcagggagagttattcctcctccatatgccttaatttcaagagtttttctcttaaatatttcataattttactaagaagcaagatacaattatcactcatgccttaatggtgcctcccaaccactacacaggtgaagtcaaaaacaatcgactactagaatggaaagactacaagaacccttaaacagaaagattaacatcattttggggcaaggaggtacatttttttaaaagattactcaactagatggctccactgaaggaatccacatcacctgacttcatattctagtatctagacttcaaggaaaataagttcacttttctgactcttggtttctttaacagtaaaatgaaacctacagactttcgttcattctaatgccctttcaaactctaaatgacctaaccttgacaggagccatgacagtaaaaaaaaggcaaggtacgaaagtgttgagcttgcccaggtttggaggtttgccccatcatttaagccaaataaatcaagcttgaattgcagattttcccatcatacagagctgagagagggactcaaatcatactactaggaagtggaaattccaaggaagttagaaaaccctgtcctcaatagccctccctggaagctggcagatatgcttgggtatctgctggcctagtcctacgcatgagtcctagcagatatgcttacaacccgacagtatcagtggcatcgttaaaattaaaatggagaaaacagtgcatactttcttcaaaagtatgcccactaaaatgatggctgcgacccctgtaaggatctagctggaccatctgcagatggtttaaatttgccattgctgattttttttctatcccctaccttgatatcaagtatttagtgtcttactatgaagtaaatcatatactttctcaatatcctattctctttgtttttctctttcattttaagtgcatgttagacatttaaagatctatgaaaaataaactcttagtaacaggtaaataactagaattttcaataaacacggaaaaaagtgttgagtgtgagcaagctttttactaaagcacatcagtctatacagccaattcagcattctccattcagaggctgcctcttcccagggatgtggctaatagtgaaaacacaaaataatgtaaggaaagaggacaaaggtttcattttctgctgtctcatcgacacatcttaacatggaggacacagtatatcagagattaaagccagaagttaaatcaatgcaaaaggaaatgcaagctccaatgtcaattatgaaaagtaacgaatcttaaataagcaagtacttgcctgcctgcctgcctgcctgcctactaagactgggttgaagattatttctatcgacaaggttacaaacagtaattttcaacacttcatatggatatacaattacctgggtacttgttaaaattacagattcctcggtaccattttcaaatcttctgattaagtggatctgttacagagcccacagactgtgcattctgatacagatagtccacagactatactttttaaaatactgtgaagtgtgtatgggagggcgatcattaggtctcctggacacataaatatacgtcttctggaatggtataacccacagtaaaatatgtgttccaaggatggcatgcaggccaatttttaactgtaccagacccactcccctcccttctacctcctaaagcaacttctgaagtcagtgctctctcaactcatataaagggcccttctaaatagtgactaaaacacactatgttggctcctattttagatcctattttaaaacaagcaaggccgggtgcagaggtcatgcttgtaatcccagtacattgggaggataaggcaggaggatcagctgagcccaggagtttggggccagcctgagcaacatagtgagacccaacatacttgcttctcctgttttacttctcttcatggttctcagtatttcctgagattcattatattttatatttacttacactctctctcactgaatgtaagctctattagaaaaggggcttccccaccactaccactatattcctagaacccagaacagtacctggcatatgacagatgctccacagaagtttaaatacgaagaaggcaccattttagaaaacaaaataagttcttagtcttacaccctgttcagtttattgaccatactgtcagctgtacctttcatcctggatggccattcttgcttttgatgtttacagaattcaggaaagtgaatataggtaccagcccagagaggctctctgctacctgactttcactactctatggtaatgtgcaatttctcccgcaactgaactacaacagaagtttaaatgtctagcctacagatagatgtttccacatgccttaaactccacaggaatgagttgtcttttactatgtgagaagtcaaatgtaatgttggcaaataccagtgtgagagctacaagtttcaacaaaagcagcacactgtatattggcagtcaaaatcacttcgctctattctgcattaggtcagccaaacgcttcctgtcaagactcagtaactctcaccatacatttttgtctattcattggtctatgggcagtaatgtcttataaagcacacattactaagtgctttatatacatcaccctattcctcaaaataattctataagagttattattctcattttagagattacaaaattgaagctccaaggcacttagcaatttgcaactaataactaattagcagggctgggatttgaattcaggtctacctgactttaaattcttggtttttttcactgtattagtttaattcttaaggcttctcccaccaccttccaccctctgcactaagcctggcacacagaaaacatttgatatttactgaatccatgagagttaaaaaggataatttaattcaaactcaaggatctgtctaggatcaaattcttcagctccaattttagttttgttttttgttttgttttgttttgttttgagacggagtctcgctctgtggcccaggctggagtgcagtggcacaatctcagttcactgcaagctccgactcccgggttcacgccattctcctgcctcagcctcccaagtagctgggactacaagcgcccgcctccaagcccagctaattttttgcatttttagtagagacggggtttctccatgttagccaggatggtcttgatctcctgacctcgtaatccgcccacctcggcctcccaaaatgctggaattacaggcgtgagccaccgcaccaggcccaattttagttttaaaaagaaaaaaagtggccgggcgtggtggctcatgcttgtaatcccagtactttgggaggccgaggcaggtggaccaagaggtcaggagttcgagaccagcctgaccaacatggtgaaaccctgtctcaactaaaaatacgaaaattagctgggtgtggtggcacgtgcctgtaatcccagctactcgggaggctgaggcaggagaatcgcttgaacctgggaggcggaggttgcagtgggccgagatcacgccgctgcactccagcctggtgacagagcgagactctgtcccaaaaagaaaaaaagaaaaaagaaaaaacttaagttcattcaactcccttttaatttttaaaaaagtggaaaatacaagtttctcagttaaaaaaaaaacaaactgggtttattccaaaatggaatccatcataacataattcattactatgggaatttggatataaagcaagtgaaatcataaaaagcagcatagcttagtgtactaagacatggatgtgaagtaaaatctgaatttattaataagtttcagctaaaagagataaatgtacttgcctccccatctaacaatcatgctctaaagttcaaatgtgttaatgcttataaaaacacttcataaatgtaaagtgttatacaatattaattattagtgttaattgagccttgaagacagaataaaagcctctaaggccagcattattaaaaccccattatatttggagcattataaggtaaacatcttaaactcaaattagtttatccttaagaaagaaaggatgtggcttacccattactaacctttttatatgtctaagtgctatgtctccaattggcactattaagtctccaatagcagagaactgggatacagacctcaatatattgtttcacttttagaaggattataaccctggcctcattgtgggggagggacactgggttctataactagataataattccctcctttcatgctaaggcacttatctattcagaacattagatgtcagatctgtaatactgataaaaaatattccagattatttcttccagctataaaagctgtgcttcttaggcggagccaataaacattaacagcataagcctatatattgattagtctttcctaagctaaagagaaaataaacagaaaatatgcaacaatctttaaaggctatagcatcactcctaatgaatgtcacaaagtgcatttatcgatgacattgctgagactgatatgaaatgataaaatatttttaaagccagtggatctgggtagataagagactgtttagaagctactgggattgtgtgtatgtggtggggcatattttaaataatgatcaagataggacaatctcatcattagactcaccattctcttattttcagccctcaaaaattaatgaccattgccttatcaaaacccagattataaagatggcaatgaggccaggcgcggtggctcacacctgtaatcccagcactttgggaggccaaggcaggcagatcacctgaggtcaggagttcgagaccagcctgaccaacatggagaaacactgtctctactaaaaatacaaaattacccaggcgtggaggcgcatgcctgtaatcccagctacttgggaggctgaggcaggagaattgcttgaaccggggaggcggaggttgcggtgaaccaagatcatgccactgcactccaccttgagcaataagaacaaaaactccgtctcaaaataaataaataaataagacaatgaacttcagaatcttgcaacacattttaacatgcacatagccttcttataattcaacatttcctccaatccatctcgcaacaaaatcctccaactattccactcctactagagaaacaaattccatcccatcaaattttcctaaggaaataagatcacttaaaagattttcctccccagttcattcattttctgcatctgtatctatatttatatacgtaccatgtgccagaatcacaatggcattgtatatctgccagggctgagtttcaaagaatacatgtgcacttagcagacaatattataaatattataaataaataagcagatttagaatacaggtgactaacacataagtaagatgtataaagggttatccacaataactacagattagtctaaattccttaatgcatcactcaaagccctggcaagctggaggttatcttttttccttctatggacagactgatccactcatttcctgaagacaaattacttcatgttataactttgcccagacattttccctgcctggaataccctttccatctcatcaaatctattcaagaaattcaatgctaatctctcttcagtggaacctttccacattcactattttttaactctacctttgttgataacctactgacattcggtatataagcatatattactatgatagatgtactgttcttttatacaggacatgcataaacatttgtgtatgtgtttatgtcataatactccaagtaaaacacaaaactccttgaaggtgcagaactgtcatttctttgtatttttacctgtacaatattatgaatataatggttattcaatagagatctgtttaagaaaaaaataaaagagggaaagagaggcggggttatccttaggatccaccaagttaacagttatctttttttttttttttttttttagagatggggtctcactatatagcccagtatggtcttgaattcctaggctcaagcaatcctcccacctcagcctggcaaagtgctgggatttcaggcgtgaaccaccatgctcagtccccaaattaatagtttcttgaaattaagcccttatcaatggtctgaatccttccattgttttatggagtactatttgtattcatcaatggtttcctatcacttaaaataaaactctacagaatctggttattgccacccctcctacttcatctcctatcatattctaccattctctctgagacctctcactcaatgttccatatacatacattggcctcctgggtcctcacgtcagccagctcatttccaccttaaggtctttctacctgggggttgggcacagtggctcacacctgtaatcccagcactttgggaggcagaggtgggcagatcacctgaggtcaggagtttgaggccagcctgggccaacatggtgaaactccgtctctactaaaaatacaaaaattagccaggcgtggtggcgggcacctgtaatcccagctacttgggaggctgagacaggagaatcgcttgaacccgggagatggaggttgtagtgagctgagatcaaccccactgcaatccagcccgggcaacagagtgagactccatctcaaaaaaaaaaaaaaaaaaaaaaaaaaaagatctttctacttggagcttcctctgccttccctcagatcttcccatggcagctactgcctcctaattcaagtcacagttcaaatatcattcctcagaaatgccttagctgacaatcctagctaaagctgcactcctctcacattacttcctagtatatgaaacttctctttttctccatctcaatctgaaattattctgttgatatgtttactacttgtctctcccaactagtatgtaaactccatgaagagaagaattttgagttctgttcaccactgtaccccagtgcctagcctggaatactagctggtatgcagaaggcagtcaataaatattaatccaaaaaaaacgagtttgtttcctctcacctaatactgtagttctcctcaggagcaagaacattgtttcctgctcctatttattcatttatttattttattttattttattttttgagatggagtctcaccctctcacccaggctggagtacagtggcgtgatctcggctcaccgcaacctccacctcctgggttcaagtgattctcttgcctcagcctcccaagtagctgggattacaggcgcatgccatcacacccagctaatttttgtatttttagtagagacgaggtttcgccatgttggccaggctagtctcgaactcctgacctcaggtgattcacctacctcggcctcccaaagtgctgggattacaagcatgagccactgcgcccggcccacacctggcttatttttaattttattttcatggagacagagtcccactatgttgcccaagctggtgtttcctacctttaatctcccacagcatctaacagactaaatgcactgaaatcaccaaataactgctcaacaaatgaggacagaaatatggtatttccttttctgacaccccctccagttacatctttaagtcaacaaatactcattaagtacctaccatgagtcaggcagtgagctaggcatcattctaatttcttactttttcaatttgtcatactcatcaatgatattctgaaaggtcaaacacctggtcataagctaaagaatccttgacactgccatccccagtcaatctcattttattgaacaaagaaatgcaactaattacagctacctgcagggcaccatataaacgtactagttactgtttatgtcaggagaccacacagaaaactttactgtccaattcttaatatgcgtctcttatctactattgttcttcaagagaacacttcttgtttaaaaaaaaaaaaaaaactataaaagacattcctgagaaatctggagacatctgaatatgggctgataaagaaaaacaattttttaggtgtgataatggtatggtggttacatagcagattatccttattatttagggtgacacatctgcagcttgtcaaattgttcagaaaaaaatttgttgtgatatatatagagacacagatactaacagcaacttaagtataataaggcaaacagttgacaattactgaattccaatgaatagtctaataagtattctatcaacttttctatgttttaaatttttcataagaagttgctgagaagaaaatgtttattttaagaagattattaggtgcaattttctagctataactacttgatggtctttaatacaagcttttacatataattagaccaaaactgatccagaaaatactacaggactcagaaactgaaccactaaaacgcaagaaatactgacataagaagtaaggaacccaaggcaaaaacctgggcaaaagcctagactaggtcccttcttcttaaccagccttgggctcagaaaagaaagacactctattttggaagcctgcttctagaaagcacaacacatgaagacccaatctttcagccttatcctcccaaggagataagtctatgatgggaaactaaactacaaaatcacagtgacgatatatacgaacagatctttctaagctcacaagcatttttaaaaatattatttaattattattgctattattacttaggcagatattaagaactataatcacaaccgccagtgtaataattgattcaagctaagattatcagtggatgctaaaaccatttggttggaaaataggatatttatactctctcaaagtcaccgtacagatttctcacaaagggaagtagggatccctacaacggaaagataaaacttaccatcaacaatgagacagactgggcgcagtggctcatgcctgtaatcccagcactctggaaggccgaggcgagtggatgacttgaagtcaggagtttgagaacagcctggccaaaatggtgaaaccctgtttctactaaaaatacaaaaattagccaggcatggtggcacacacttgtcatcccagcttcttgggaggctgaggcgggaggatcacttgaacctaggagggggaggctgcagtgagccgagatcgtgccactgcacttcagcctaagcaacagaacgagactccatctcaaaaataaataaataaataaataaataaataaataaataaagagatagactgacattatatgactcccagtacaacacaaggggaagtacacagcagcatctatgtaatatttcttcccaaaaatgtctaccctgaatctaagtacaagaaaacaatcagacaaatccgatttatgggacattataactggcctggactcttccaaaggagaatgttattaaagatatacacacaaacaagttagaaaggactgctctagatcaggggtctgcaaactgaagttttataggaacacagcaacgcccatttgtttatgaataatttatggctgtttttccctcacaagagacaagatggcccacaaacctgaaaatagtatctagctctttacagaaaaagtctgctgactcctactctagattaaaacagacacaaggccaggcaccgtggctcacacctgtagtcccaacactctggtagcccaagtcaggaggatcacttgagcccaggagtctgagaccagcctgggcaacacagcaagaccccatttctataaaaaattttaaaaattagccgggtgtggtggtgcacgtctgcagacccagctactcaggaggctaaaacaggaggatcacttcagcccaggagatggaggctacagtgaagtatgaacacaccactgcactccagctttggtgaaaaagtgagacccagtctcttaaaaaataaacaaggccaggtgtggtgacttacccctgaaatcccagcactttgggagatcgaggcaggaggactgcttgagcccaggagtttgagaccagcctgggcaacatggtgagaccctgtctctacaaaaaaatttttaaaattagcctggcatggtggcgcacgcctctggtcccagctacttgggagaggctgaggtaagagaattgcttgagcccaggaagttaaggctgcactgagccatgatcaggccactatactccagcctgggggacggtgtgagaccctgtctgaaacaaacaaaaatagcagtggaaattagttgccatgcttttttttttcccaacttttaagttcaggggtacatatgcagaatgcgcaggttggttacacaggtaaattgtgtgccacagcggtttgctgcacagatcatcccatcacccaggtactaagcccagcatgcagtagctattcttcctcatgctctccctcctcccacccctgccatgctttattaaccaatgaaagctcaatacaaaaactcaatcccctggagtatgtttcaagaagaatctgtgtgacaaggaactatcaccaacaaaacaaataccaatccacaattctttgtttggggctaaatgtgttttgaaattcaaaatttttcaaactttggaaacttaaggactggggcagcacccaataggcaaacacattaatatttctacagttaaatatgtgaataatcataataaaaagtgaaataaagattataaatagcctgcttcaattcaggtcaggttttgccaggaagcaaattactttattcattttaaatgcattttggcttttagaattacatacaaagaactatggattccttaggaatattctacacttgtattcaaaccatttaatcagcctacactagtacctacttatggggtggagttgggtagacttcagagattttccaagagaattgtatttgtgattccaacatagttgcatattctattgaagattcagaaaaaccacattaatatgaacaagtggttaggaacaggcatggtactggaatacatcattttaatcaggattcaaagcaaccagagagaacacgggttgggatagtgtaaaagcactcacattggaccggagttgctgtacatatatcataggtagccaattcaagagcttagagatacatgtaactgtttaaggctgcaaataggtctttaaaggaagagaatattattaaaattttaaattatgcatcaacttatacctaaaatatgtaacaaatatatgttggttttacttgatgctataaattattagggatcagaatttggagacaaattactataacccttagttgagaagctggtaaattcttgatataactccttaaccagactaacttagtaacccatgacaaagtagtatactggaaatagtggtgaactgaaagtccaggagacctcaattctcatctcaattctgctagtacttaattatacaacctgacccagaaacatagtagacacccagcaaataggttgctaaatcaatgagcttttttgtgcctctaattcatcatttgtgtcacagaacactagattaaagaaatttaaaggtttggtttagctataaattcttaaataaaaatgcaggtttattcaaatgattagagttagtcagaattaataacgactaattttaaagaaacagacagggccaggcgcagtggctcacacctgtaatcccagcactttgggaggctgaggcgggcagattccgtcttaaacacacacacacacacacacacacacacacacacacacacacacacagagggtccttcattaaagaggaaaaaacaaaaacaattttccaacaaacgtaaaacagcattacataggtcctgtagtaagaacaaatgagagggagtataatctgatctataacatgtgccccccaggaccttatcaactcaaactttagtattgtgtgaccttaaagattagtccaaatcattcactttacagatgagaaaactgactctgaaaaaattacataatatgcccaaggtcatactctctggccgcgacaatgacaggactaaaacccaaagttccgacgggcacggtggctcacgcctgtaatcccagcactttgggaggccgaggcgggtggatcacgagatcaggagatcgagaccatcctggctaacacagtgaaaccctgtctctactaaaaatactaaaaatacaaaaaagtagccgggcgtggtggtgggtgcctgtagtcccagctactcagggaggctgagacgggagaatggcatgaacccgggaggcggagcttgcagtgagccgagatcgtgccactgcactccagcctgggcgacagagcaagactccatctcaaaaaaataaaataaaagttccccagttcccagttaaatgcttacttcctttcttgtaatcaaaggcttctagaactgcataacaacaatggtgctatctgtcatatggcaatcacttcagtcaacatatgctctgtcagaacctctagttccactatatcatctttatacatggcatgggcaatgaactctaggcaattaaataaaaaaacccacatagaaagtatttccaaatcctatatccagtaagagacgagtatccagaatatacagagagatacagagatcttacgactcaataataaaaaatatccaactaaaaatgggcaaaggatttgcacaggcatttcttcaaagaagatatacgaatggccaataagcatatgaaaagatgctcaacatcattaactgttaggaaactgcaaatcaaaaccaaagtgaggcgaggcatggtggctcacacctgtaatcccggcactttgggaggctgaggcaggtggattacctgaggtcaggagttcaaaaccagcctggccaacatgtcgaaaccccacctccactaaaaatacaaaaattagccgggtgtggtggtaggcacctgtaatctctgctactcaggaggctgaggcaggagaactgcttgaactcggaaggcagaggttgcaatgagccaagattgcgccactgcactccagcctgggcgacaagagtgaaactccatctcaaaaaaaaaaatgagatgacacttcatccccactggtatggctgtaataaaaaaaagacagacaataacaagtgtaagagaatgcagagaaactggaaccctcatagattgctattgagaatgtaacatgatacactgtgaaaaatgtctgacagtttgtcaaaaagttaaacatacaggtactatatgacccagcaattctactctaggaattacatccccaaaaatgaaaacttatgtccataccaaaacttgtagaagtattcatgacagccaaaaattgaaaaatgtccatcaactaataaacagataaacaaaatgtattactgttactattaatttatcttgagatggagtcttgctctgttgcccaggttggagtgcaatggcacgatctcagctcactgcaacctctacctcccaggttcaagcaattctcctgtcttagcctcccaagtagctgggattacaggtgcatgacatcacgactggctaatttttttttgtattttagtagagatggggttttaccgtgttgcccaggctggtctcgaactcctgagctcaggcaatccacccgcctcagcttcccaaagagctaggattacaggcgtgagccaccgcacccgaccacaaaatgtagtattattatacaatgggttattagccttaaaaaaataaaacaaagtactgatagatactacaaaatgtggatgaacctggaaaacactatagcaaatgaaagaagtcagatacaaaagtctacatatggtatgattccatttatacaaaatgtccagaataggcaaatccatggagatagaaagtagattatgattgccaggggctagaatagcagagaacggagagtgactgctaatgagtatgggtttcttttgggggtgataaaaatgttctgaaattaaataatgatgatggttgcacaaccctgtgaatgtattttttttaaagcaccgaattatacacataaaatgatttttatggtatatggattatgtgtttgtgtgtgtgtgtgtgtgtgtgtgtgtgtgtgtgtatatatatatatatataaatgaggccaggcacagtggctcacgcctgtaatcccagcactttgggagactgagttcagactgcctaagctcaggagttcgacaccaccctgggcaacggtgaaacctcgtctctgctaaaaatacaaaaattagccagggatggtggcacgtgcctatagtcccagctactcgggaggctgaggcaggagaatcgcttgaacccgggaggtggaggttgcagtgagtcaagatggcaccactgtacttcagcctgggtgacagagcaagactccatctcaaaaaaaaaaaaaaaaaaaaaaatatatatatatatatatatatatatacacacatcatatgtatattttgtatatataatgtgtgtgtatatatatagattatatatagatatagattttttttttccacacacacacagacaccaaagcgtacttcccactcatttcccattcatgccctctctggttggaaaaagtaaaatgccaacacaaggtgaaagcatcaaggtctcaattcagtatctattgagcaaggcatgtactataaagtgggaatacagagatagtctgatcttatgatattcagtttattataaataaagtacgcaaataattacaacacaatgtgttaagtgcaacaacagatgtacaaagggcagaaggaggtataggtgacccttgaacaacatgggtttgaactgcacaggtccatttacagatggattttcttctaccttcactaccccaagacagcaagaccaagccttcctctccctcctcagcctactcaatgtgaagatgacaaggaagacctttatgatgatcctcttccacttaatggatagtaaatatattttctcctgcttatgatttttgtaacaatttctttagcttaatttattataagagtacaagtatataatacatacaacacagaaaatatgtgggtctaatatagtggttcacacctggaattccaacactttgagaggctgaagcaagaggattgcttgaggccaggagttcgagaccagccctggcaacatagcaagacctcgtctctacagtgaaattttaaaaattagctgggcttggtggcacgtacctatagacccaactacttaggaggctgaggtgggaggatcacttgagcctgggaggctgagactgctgtaagctgtgctcatgccactgtataccagtctggagggcagagcaaaattctgtctcaagaaaaaaaaaaaaaatgtgttaactgtttatgttattggtcaacaggaggccattaagttttggagaagtcaaaggttacactcaggccttggagagagtaagggctgggtgtattttcaagttgagggaccaccctactactacccccacatcatggtgtttcctccaggagtccaagagccttgccattcctcttggtgcttccttcaggagttgaagggcctggctattcttctcactcctgtagtagcacctatccagactctctgctgttttctgacttagggcaactacaaccatggctgacaaatggtagctactcacatgggtggaagaaagggtactacacatattacacatatgtaatacacatattacacttacaccaagctcctggccatctcttgtggcttcaagcagaaccccaagcagttcatgatcacctggatcttgcagatgcacaaccagtgggccacgccctgtccttgaactcctgggagctggtggtgctaatgggcaacttgactcacaatgccatcttcaactaccactgcaatgccttgtgggaaagtggcatggcactgcttgcctggctgctcagagcctggtgccagcgctaaaagtccttcctgccctttgaggccaccgagctgcctttctagccctggaccaccaaggaggagggcatccagctggtgtgcaagacaggcatgctcgactggatctactgtgagcccctctcggcctccttggaccccttgtccccctcacatgagccagtggcacccaaggacatgcccttcactcagggcctacagcagtgtctgctgctggcaacacctgctgctggcagcaccctcagagctacatctctccctggtcactctgctagaggccatgatggagctcagaccatctccaacgttggcctgctctggcatcagagccagtcacgccacaccaggctcatgctggagcccaatccaatgctcaagcacctcacaggctggctccttagccacagtgtgcccagggagaaggtggataaagagctcaccaaggtcctcctggagctgtacggcaaagaggccaagtacaaccacagctacctggtctgtgggctgggagacgaacagtccctaccacccctctactctgaccaggccagcaggttggagccacccatgcgtgacaactagccctcagcctggctcttggagaacgggacacggcctggccccacattcctggaaggtgggggaaaggaggaaggctagatttcaggaaacctgctttctgctttgagttcaggggagccaggcaagggagcctgggaccttgtaggggagacaaaaagccttgggcagtgccctcccagtgtatcccttgagcctcctgtgggcaagccacaccctcatgccatgttcaagggacccaagaagacaggtgtgtccttgccctcaaccactcacatgggtatcactggtcagagctgatgaggggagcaagccacatcagtggccaattgcaatgagtctctggtgtccctggagggagtgagagcacccaaggacatagtattcagtgtgttacattttggcctgggcagcaaggtgggtgggcacagcggtgcagccacccctctgccacatgggccaccaaagcactacaggccaagcagggagatctcatggtccataacataaaatcatcttgaagtttttactctaatttttgtgtttttttggaaacagggtcccaatgtcccccaggctagagagcaggggcaagatcatagttcactggagccttgacctcctgggctcaagcgatcctctcacctcagcctcccaggcagctgggaccacaggcatacaccacaatgcccagctaattttttttttttttttgagacagttttgcttttgttgcccaggctggagtgcaatggcgccatctccggctcactgcaacctccgcctcccgggttcaagcaattctcctgcctcagcctcccatgtagctgggattacaggcatgtgccaccacacctggctaattttgtatttttttagtagagacagggtttctccatgttggtcagagtggtcttgaactcccaacctcaggtgacccacccgcctcagcctcccaaagtgctgggattacaggcatgagccaccgcatccggcaaaagcccagctaatttttaaaaatactttgtagaaacaggatcttgctacattgcccaggctggtctcgtactcctggactcaagtaatcctcctgccttagactcccaaagtgctgggattacaggcataaaccaccacacctagcctactctaaattttcaaaggtctttttaatgcattatttttagttaatattttattttgtggatacatgacactttaattttggtgacagtcatttctctttttgtaatggttcttctcttaaggcaatgtttttctttttggcattgcctcccactttgaaagcacatttttgctgtttgatcactgaggaaggagctgccagtcccttctgatgagtctggtttctccaggggcatatgtggcctcgggataatctgagttctgaatcggactttagggtatgatggggccagaattacacattacagcttgcgagaacagagccctggtggtctggcttcatacctgaggtgctgggcacacaggcatccaataaatggtgggtgcataaaatatatatatatatacacacacacacacacacacacacacacacacacacacacacacacacacagatttttgacagcaccagagggttggcacccctaactcccacattgttcaagagtcaactgcaacttactatggatcagggaaggtctcacagaagagaagatacctaaaggtagattttaaagaatgaataggccaggcacggtggctcatacctataatcctggcactttgggaggctgaggcagcaggaggatcgcttgagctcaggagtttgaaaccagcctgggctacatggtaagacttcgtctctattttttttttcttttttgttttttgatagagtcttactctcttgtccggggtggagtgcagtggcatgatctccactcagtgcaacctccatctcctgggttcgagcaattcccctgcctcagcctccagggtagctgggatttcaggtacctgccaccaagcccagctaatttttgtatttttagtagagacggggtttcaccacattggccaggctggtctctaactccttacctcgtgatccacctgcctaagcctcccaaagtgctgggattacaggcatgagccaccgtacctggtcgatggtaaaatttaagctgactcttttaaaatgagtagaatctatgtataaaaaagaaaaatgactagattttcagatatactaaggaaataataaatagtgggcaaaatacaactggaaatgcacatacttagtttggcacagccagagtaacccagattgctgaagcggcactgactagttactggtgatggtatgactttagtagaaacactgtctatagtgttttagttgcttcagttgttttttgcacatattcttaccataaacatccctctaggattgttatgctggataaaacctttgcgccaggctaactgtttaccatccttatttcatttttacaacaaatctgagataagtattaatatcccaattttaactagaaactcaacttcagaaaggttcataacagttcacagtaatacatcccagcattctgttaggtgttacaaatttattatctcatttaactcttcaaacaaccctaagaactaggtattgctggtacttctgttttacagatgagaaaactgaggttcagggaggttatgcaatttgctcagggtcacagtggtcttaagaggcagaactgagaattaaaattcaggactgccttatcctaaagctctcttccattacagtataatgctttatctaccttcaatcataactcagtctaatccaatatgctttgattgttatactctctgcatttccagtaactaatatggtagtagcctcttgcaaggacaggtacaatacacatttgctgaagacagtgcttttacgtattaaatataagggaaggctacagccagagaaatgctagccaagagaagccccaacacaaggtgacttctcaaagactcttcttttcaggtttttccaaaggatatggaagagtctccaatgctatatcttttcatcgaagagatggaaagagtacatctgaccaagatctggttacagcaatgcagagatcttgcagtacatactgcagcaaaatcaggtgctgacagctgagagatatcaagtggcataaggctgtaagaagggaaaaaagccctagaaatacttagattccaaaaatgtctctaaacgactgcaagaaactgacacacaacaaaagagtgggattctattaaatccatttaagagttaaattggtgaaacaactcacataacaccaacagatcatactggtagctcaggtctcctctcattttaccttttttcacataaaaaggtaagctgtcttcccagttcctggcagatgtgatatccttcaaatatggtttctcagcttcccagatggctaggctagactaggacataagaaatatgcagtaacatgctccccacctcccatctaacagcaggaagagaataaaaaaccaaaagaagaaaggagtagccagcaatgatctcttctctcattccaaataccacaggttagtcctgcttatataagagaggtaactattagaacacatcccaagcctttttatttttctctttcaggttggggttaaggaatgttttaaattgtatttcttttcattttggtgggggttttggggggattttttggttgttttttctttgctctgtcttgctctgttgcccaggctgcaatgcagtggtggcatgatcacagctcactgcagcctcaacctcccagactcaagtgatcttcccacctcagcctcccaagtaactgcgaccacaggcacatgtcaccacgcccagctaattttttgtattttgtgtgtttgtaaagacagggtttcaccatgttgcccaggctggtctcaaatttctgggctcaagggatcctcctgcctcagcctcccaaagtgctgggcttacaggtgagccactatgcccagcctatttcttttaattttgttctggtgtgcttaaataagtttcttcatggatttctttgtaaaacaagacttactataacagactctagaccctacctctctcataggaacgctatttgaaggaaatgttaaagtacttgaaaaacttaaaagcataacacaataataataggtaatatttattgtgtttgttttgtgtcatttaaagccctttgcgtgaactaacgtattatctcacaacaaccctatgaggcagatactattaatctcttttttttttttttttttgagacggagtcttactcttgttgcccaggctggagtgcaatggcgcaatctcagctcactgcaacctccgcctcctgagttcaagtgtttctcctgtctcagcctcctgagtaggtgggattacacgtgcatgccaccacgcctggctaatttttgtatttttagtagagacagggtttcatcgttattggtcaggctggtctcgaactcctgacctcagatgatccacccgcctcagcctcccaaagtgctgggggattaccggcgtgagccactgcagctggccaacctcatttttaagatgagtaaactgaggcccagaaaaacagagttcctttccctagtttacacaaatattatatggtagagctggaattcaaactcaattcatttgagtcaataaatttgagtatatattactcaaatatacttatgtaatgaaaattatgttagaatattactacacatggattaaggaagcaaacacaataacctagtaaaacattcaacaaataatttgaattctttgtcctcaccatcgtaacaccaccatcttttttttcaagacagagtctccctctgtcaccaggctggagtgcagtggtgcgatctcggctcactgcaacctccacctcctgggttcaagcgattctgctgcctcagcttctcgagtagctgggactacaggcacatgctaatttttgtatttttagtagagacggggtttcaccatgttggccaggatggtctcgatctcttgacctcatgatctgcctgcctcagacacccaaaatgctgggattacaggcgtgagccaccacgcccagcccatgcaccattatctttatgcattctgagattaacatgtaacagataaatttatgcggaacataggctctggagtcacacaaacctagtcacatgacgtcacttaatagccgtatggacaagttacttaactgcgtctcagtgtcctcatgtgtaaaatagggataatacctatcacacagaatttaagaactaaatgggacccccatgcggtgcctcacacctgcaatgccagcactttgggaggccaaggtgggaggatcacttgaacccaggagtttgagatcagcctgggcaacatggcaaaaccccatctctatcaaaacaatacaaaaattaggtgtagtggtgtgcgcctacagtcccagctacttgggcggtagaggtggcaggatcacctgagcccgggaagatcaaggctgcagtgagcagtgatcacaccactgtactccagccttggtgacagaatgagactctgtctccaaaaaaataataataataggctgggcgcgatggctcacgcctgtaatcccagcactttgggaggccgaggcaggcggatcacgaggtcaggagctcaagaccatcctggctaacatggtgaaaccccatctctactaaaaatacaaaaaattagccaggtgtggtggcgggcagctgtagtcccaactactcgggaggctgaggcaggagaatggcgtgagcccgggaggcggaggttgcagtgagccgagatcgcgccaccgcactccagcctgggtgacagagtgagactccgtctcaaaaataataataataataataataataataactacatgggctttaagaaatgcttaatgctggcctggcacggtggctcatgcctgtaatcccagcactttgggaggccgagacgggtggatcactttaggtcaggggttccagagcagcctaaccaacatagtgaaaccccatctctactaaaaatacaaaaattagcaaggcatggtggtgggagcctgtaatcccagctactcgggaggctgaggtaggagaatcacttgaactcaggaggcagaagttgcagtgagccgagatcgcaccactgcacttcagcctggggtgacagagcaagactctatctcaaaaaaaaaaaaaagaaaaagaaatgcttaatgctttaagaaagttggccaaagccaggtgctcacacctgtaaaccaagcaagcactttggaagactgaggtggaaggatcacttgaggccaggagtttgaaaccagcctgggcaacatagtaagacccagtctctacccaaaaaaaaaaaaaaaaaaaaaaaaattaaatggattatatactcatcccagaatagttgttggcacatagtaagtgctaagcaaacaccattagctactactgttaatatttttatttcatttttctttgccattttccatgtaaacaagtatctaaaaaatgtttgtctcaaagctatcaagtaatcttgaaatgggcatatgttttacatttcacatttcagtgtctccatactttggtaatattttccagtaaatttataatccatgtaactaatattgctgcctatgcaagcatctcttctaccattttgaacttaagaaatacaagaatacaatagctacattgtgtttcttatgtgtagtgataatactgcaaacccttatctcttaatataaactgccacatttctaattacatgagagtcactctgtatggcttttcatcaaatgccccaaattaaaataggtagtgtcttcttaaaattacttactttttcatttgacaaatctcagacccaaaaggtaaagggacttgtgacttgctcaagttcatataggtagataatgataaagaccgacccggaaccttcagactgagttcaaagctctttttcatctctctgggctgaataattccatttcttgtcaggggaggtgataaacatctgaaaatagtgaatgactcaaatctcccaaggttaaaaaaaaatttcaagaagacaatcttcaaaggtcatttaatgtagcacaacaaaacaacaacgaccaaagtggcataactcagtactgtttccttctcaaaaaatcaggtcatctcgaaaatttgctttactaaatttgtattagcctaacacaaatctcatgctacttcttcccagctatctctgcaactttctgaaactgggcaacttcagctcaaaattcaatgacaaactccagggaactgtcacagtgcaatgttataggaaatattcctgaaaataagtggtgcttgtgaattctattctactgagattctcagtgtaattatttttctgtgacagaatctgatttgtttcatgaaaccatgctaaaataaaaaagaacacaaaaatgttctcatttaggacactaattgatataaaatttcccaaaaattttggagcagttcaaatctaacaagcatttaccaaaggatttaatccatatcattctttcaaaaagtctggcctataatcccaatgctttgggaagccacggtgagaagaccacttgatcccaggagttcaagaccagcctaggaaacacagaccaatctctaccaaaaatgtttaaaattagccaggtgtggtggcacatgcgtatggtcctagctactcaagaggcagaggttggaggatcacttgagcctgggaggtcgaggctgcagtgagccatgatggcaacactgtattccagcccaggtgacagagtgacaccttgcctaaaaaaaaaaaaaaaaaaaaaaaaaaattaaattaaaaaataaaaattaagaaagtccactctgaaaacaacataagactttttacttgttatagatttaaccagagtcaagaccagaagtgaccaatccattttacacacgagccacagcaggactgaggagagaggaagagaaaacaggaagactagcaagtcaaatcaattatttacttaaaagtccacagagtacagagcactataagatgtacagtgccaacatgctccaccctttctctgctagtcagtacaggccacaagatgaacaccagagtccaacaaccagccaaatgccaggcaaaatggccttatcaggctagatggggtcaaacacatatatttttaacttatagtcaaagaggctcaaggaagatgatcaacaacttaaatattgcagcgatattaaggaaaacaaggctaggaaaatgtctgaatatacagacattgggtcttttgaatgtgcatttacagtagtgttggggacagaaacaagacaggaaaagtcttaaaaagtgagtgagtgtaaaagcaaaagctgcatacaaaatgccattttaaaaatgtttagaagtaaaagggccgggcgtggtggttcacgcctataatcccagcactttgggagcggatcacgaggtcacgagatcgagatcagcctgaccaacatggtgaaaccccgtctctactgaaaatacaaaaattagctgggtgtggtggcacgcgcctgtaatcccagctactcgggaggctgaggcaggagaattgcttgaacccgggaagcggaggttgcagtgagccaagattgcgccactgcactccagcctggtgacggagccagactccgtctcaaaaaaaaaaaaaaaaaaaaaaaagtttagaagtaaaagaagaaaaagatggcaataattcaaaaagctgaaaaggcagaaaatttttatttgttttaggatagacaagacctctgtatttgtagtctgaaaagaaagactcaatagcgaaggtgaagatggaagagagaaagataactgatgagagtgaggtactggatactagagaatgcaatgaagaagaaaactgatccatgtggatcctggaagtcatcagacaaaagcaaataaagcaatgggacaaaagacaaaaagcaataaaaatggggagagaacagatggtaaggactttttgaaaaatcagaagctgtgcaaaaatggcaaaacaatggtctagagggacagtgaatgactagaactacaatgattgctcccctcgtccaaggagttgcagagtattcaaccaatgaaaacagaaataatagcattcattacagaaaaagccgtgttttcacttatgggttaggagatggaagaaatattggaagaaaaaaaattaagaacttaggactttgctcacatttgtgcacaggttctaccagacccagcagaaacaggtagtaaagggacatcaagaatgaggtagaaaagaatgggactgagcttttaaaatactgaggcaataaggcagacggaactttgagataactttttaccaacagtgaagatgaagaagagtaatctaaagaactttatggctgcagaggatgaggggaatgaagacaaacatatcaaaaaactgctggataccacagacaacaagtcttcagcactaactagccctaattttcaagtggaatcatctccaaaacccactttcccagaagctggacctgaaatatcctttaatttcatttgccaagactagcaagttgctgaactgtgtcaacagtttgtttgtgtttgtttttcgaattggacatttgtttttaataacgatttgttgtgttctacaaaggcataggagggacattccccaaaagataaatgaatgccacatgactagaactgggtcttctatttttatgatttagaactgggttttttgtttgtttatttttttaggcagagtctcgctctgtcgcccaggctggagtgcaatggtgcaatctcggctcactgcaatcccctgcctcccaggttcaagcgattctcccacctcaacctcccaagtagctgggattaaaggcacccgccatcatgcctggttaatttttgtatttttgtagaaatgtggttccaccatgttggccaggctggtcttgaactcctgatctcaggtgatccgcctgcctcggcctcccaaagtgctgggattacagacatgagccaccgcacccagccataactgggtcttctaagccccctttgcatgctcagacaggatggaaaaggatagataacaccagttaatatttagttagcacttcactgattcaaattactatctaatcaattagctcaactgacccactctttattcctgttcttatggtgcgtaatccaaggatagaggagcagaaagaacatggactttaaagtcactgacctagaattctaactctcccggttcccccagggatatttcttaaacctctatgagcttccatttcctcacctgtaaagtaggaataacagtacctatttcatgaggcagttgtaaagattaaagtgtaagtcaagtacctactacacagtagatgcttaagaaatggtagataatggccaggtgcagtggctcacgcctgtaatccctgcacttgggaggccagggcgggtggatcacaaggtcaggagttcaagaccagcctggccaatatggtgaaaccccatctctaataaagatataaaaattagctgggcatggtagcacatacctgtagtcccagctgctcgggaggctgaggcaggagaatcgcttgaacccaggaggcggaggttgcagtgagccaagatcacgccactgcactccaacctgggcaaaaaagcaagactcagtctccaaaaaaaaaaaaaaagaaaagaaatggtagataatatactccacatgttgcaatgaaaagaaatggaagaccattttaactaatgtcattataaactaaaccatccaagctgaaccacaatttattggttactgttgttaatacacacagggcaaattatgttaaaaaaatcataaaataacaaatgttttccaaaaagtcctctctatctaacagttaacctaactaaggatgacagtgtttattaaggtacgattttcataactaggaacttatacaatgtttcatggtttgaaacgtactgtatttttttccaaatgattacttccaaaataaactaaacttttaacttccagcttaatcctggggcaattttagagaatctcaacatctcacaaataaatggaattgaaaaagcatatggatataatgcagtccacagagaatttgagggcaaaagagaggctatgtcttgtaccctttccaacttcagttaactaataccacaaatgttcctcaattctaccaatttctttctttatttttttgagacacagtttcactcttgcccaggctggagtggagtgacacaatctgggctcactgcaacctctgccccctgggttcaagcgattctcctgcttcagcctaccgagtagctgggattacaggcgcccaccaccatgcccggctactttttgtatttttagtagagacagggttttgccacgttggccaggctggtctcgaactcctagcctcaggtgatccaccagcctcgacctcccaaagtgctaggattacaagtgtgggccaccgttcccggccaattctaccagtttcataagcttaagagctatcttcactttcttttcttctttctctacgttattaagtcccatctcttccttctccaaaatctctccaatatattcctttttcttcccattccacttgctaaattcatgcctgcagcataattttatttctttaaaaaaattccttaactggcttcctttcagataatctatacaacacttcttgattaatgtcataattccaagttcatcaagtcactgctcaacttgtaaaccttcaatgattcccaaatgttagcaagatcaggtccaaattcctcagtatgactgttaagactgttcataatctcaatgagcattacttcactatcttatctccttcctagtccataatctaaactctattactagaccagacaagtattcccagttcccatcaataatacgtctaatctctatctttgcccttgatttgctcttgcctagaaaaccattccctcatccttaactttctcaaatacaaaagaaaaaaatttaaaaagtaaaagaaaaacaaaaccttctctttcctttctgcctcttcaacctctatccatccaccactgaaaaactctagtctaactgcctgcatgaagccctcacagaccacttcagcctaaactaatcccagtaaactgtaacctgtcatttcaacatacactattagcataacaacagacctcctagggcagtcattttagtcaatggtattttcacccaagaatagtaaatttttcataaggctaaattattcaacatgaaaaacccctttaatctgagatgatgccctttctcttacctgtttttgttttgttttgttttgttttgtttttaagacagagtcgcagccagtcatggcactttgggagttcgagaccagcctgagtgacatagtgagacctcgactctactagaaatcaaaaatattacccacaaacggtggtgcacacctgtagtcatctcagctactcaggaggctgaggtaggagaatcattgagcctgggaggttgaggctgcagcccccgcctgggcaacagagtgagactctatcacacacacacacaacccaaatgctcctcaactggtcaataaacaaactataatacatctatacaatagaatactactcagcaatgtaaaggaatgagctgctgatacatgcaataatgtggatgaacctcaaaaatacgatgctaagtgaaataagccagactaaaaggctacagactacagactaccacttacagaacattctggaaaaggcaaaacgataggaatagaaaacaacgcagtggttgcctgagggtaagaattggggtagactacaaaagagcagaagggactttgcagaggtgatggaactgtgcaaaatcttgattgtggtggtggttgttggacagtatacatttgtcaaaactcacagaactttgggaggccacagtgggaggatcatttgaggccaagagttcaacaccagcctgggcaacatagccagacccccatctctacaaaaaaaaaatttttttttaattaccaggcatggtggtttgtgcctgtagtcccagctacttggggaggctgaggtggaaggactgcttgagcctgggagatcaaggctgcagtgagtcatgatcacatactgcattccagcctagggaacagagtaagaccctgtcttctttttcttttcttttttttttgagacggagtcttgctctgtcgcccaggctggagtgcagtggcatgatctcggctcactgcaagctctgcctcctgggttcacgccattctcctgcctcagcctcctgagtagctgggattacaggcgcctgccaccacacctggctaattttttttttttttttttgtatttttagtagagacggggtttcactgtgttagccagggtggtctcgatctcctggcctcgtgatccgcccgcctcagcctcccaaagtgctgggattctttcctttattttccttttctctccctctaagttaccttattatttccgtattaattctccctgctccattaactgtcctcccatctatttttccatcacatgtctttaagattctggtagtcactttaaaactgccctaggatctagtctcaaaacaaaattctaacataatgataagtcctcaagttcctacagaaaatattttcgcatatgttggaaaatgtctaattttatcaaattacactaagaatatatcatattatactccattacagctgtggcaagaagcataaaaactggtattcctgatttaaatctaccagggaccattactttgtttacacaccctaactacattttctaaatatctctataagaatcttctatatttaactagtttctgtatacttctgtaaagtcttccatttaatgaatctttaagtccatcaagatctaaaaatggctttctttcaatcctaggaaacataagacaatgttgacctcatttacttacagggcagtacacagttcataaaatcattatgtgttaaaacaatgtaatgttcaagagtaaactcaaggtcaaatcctagcttggcactgaccttgggtcaaaccgatctcacatcttagggacttagttttttcctctgcaaaatgaggataataatagttatcctcattaatatctaccctaatgggttgctgaaaagagattaaataaacacataaaaggtacttaagtactgtagctgtcatatagaagtcagcaactggtttcatcattagtcctcaatgactaagaattcttcaaaatatctgaattataaacttaaatgggccaggcgtggtggcgggtgcctgtaatcccagctactcggaaggctgagatgagggaatcacttgaacccgagagccaagatcgtgccattgcactcactccagcctgggcaacaagagtgaaactccatctaaaaaaaaattaacacttaaatgagctgctcattcactggtgaatcactaaaatggcctaaatcagataaatacccgcagataattgggaaaacagcacatttttgataaagctgttccaggacttaaccaaaaattaactttatctcaacagttaacgttaccagttaacttgaaactagataaaaacagagatttatgtttagaaacagaaaaatgctgtcagaccaaggtaaatgataccatttttctatttgagttcttcagcatctgtagaaagcctatgcaaataaagccggccaggcacggtagctcacacctgtaatcccagcactttgggaggccaaggcaggtgaatcacttgaggtcgtagttcgagaccagcctggccaacatggtgaaaccctgtctctactaaaaatacaaaaattagccaggcatggtggcatgagcctgtaatcccagctactggggaggctgaggcaggagaatcgcttgaacccaggaggcagaagttgcagtgagccgagatcatgccactgcactccagcctgggcaacagagcgagactgtctcaaaaaataaaaacaaaaaataaagcattggaaagtgggccagaaaaatacatttcaccctttaattatacttcagttcgaatctgttcctacacagatttgcctgtcagcagactaaacatgttcctttcttagacaaaatttaacaatattaatttattaacgttataaataaaatcacagtgacattaatacaacctaatgttttcattaagagaattccaatttaattgtaatatgggtcatattcataccatgatttgttttatagaggtttcagcactgaaaacaagtgctgttattcaatggcgccatcttgggaggtaagaccttccaaggattgggatgactgggcgcatcttccaatcatgtggccaagactcaaaacttttttgacgtgccatttataggattctcaaagacaaacctcacacacacacaaaatgctagtctccaccttttagaataacatttcatttgtggccaaaaacaatgctgaccactcacttccttcaccagactttcctatctccaaaagttaaatataagcacctgcacaatgatgacttaccagaattaagaacacgtaatatgctctaaagacaaattcaaaagaaatataccaaatatttcagaatttggaaatgtcactaaaataaatacataactttccaaggcagggagcagtggctcacgcctgtaatcccaacattttggaaggccaaggtatgaggatcactgagcccaggagttgcagaccagcctggcaacatgccaaaatcccatttctaacaaaagatacaagaattagtagatgtggtagtgcgtgcctatagtcctagctactagggaggctaaagtgagaggactgctagggcccgggagttcaaggctgcagtgagctgtgatcatgccactggagtccagcctgggtaacagagtgagaccctgtctcaataaaaaaaaaataacttcccatttggagagttctgatgtttgtttttaaaaagccgtcctaggccaggcacagtggtgcctacctataatcccagcaccttggaaggctgaggcaggaggatcgtttgaggccaggaattcaagatcagcctgggtaacatatcaagacctgtctcgccaggcacggtggctcatgcctataataccagcactttgggaagccaaggcaggcagatcacctgaggtcaggagttcaagaccagcctggacaacacagtgaaacctcatctctactaaaaatacaaaaattagcccagcgtggtggtgggtgcctgtaatcccagatactcaggaggctgaggcagaagaatagcttgaacccaggaggcggaggttgcagtgagccaagatcgcgccactgcactccagcatgagccatagagggagactccatctcaaaacaaaacaaaacaaaacaaaacaaaaataatacataaatcttgcccctaccaaaaaaaaaaaaatttaattagccaggcatggtggcatgcactagtagccctagctactcaggaggctgaggcaggaggatcgcttgagcccaggagttcaaagttgtagtgagctattattgagccaccgcactccagcctgggcaacagaatgagaacctgtctctttaaaaaaaaaggcagtcataataccttacagttgccccagagatgactatgaaactacatagtaacaaaattggaaatgtgaaatatcataccagatctgtgtaaaagcagtcaaatgatactgaaaagtaatgaaaaacaactgaaattgtctaatttaaacatttaaactcatacttccattatatttgcttccagagtgcccctgaaggcacagtatttaatatggttatttatatccactcatctttttatactcggttcaccttggtttgaataaactgcgattttccaaaataaagactttccatattgtttgttgttctgtgaaatttttcttgtaaaagatgggttaggctaggcgcagtggctcacgcctgtaatcccagcactttggaaggccaaggcaggcagatcacgcggtcaggagttcgagaccagcctggccaacatggcaaaaccctgcctactaaaaatacaaaaattagccaggcatggtggcaggcgcctgtaatcccagccacttgagaggctgaggcaggagaatcacttgaacctgggagatggaggttgcagtgagccgagatcgtgccattgcaccctgacctgagtggcaagagcaagactctgtctcaaaaaaaaaaaaaaaaaaaaaaaaaaaaaagggttgggtccaggcatggtggctcatgcgtttaatcccagcactttgggaggcggaggtgggcagattacctgaggccaggagttcaagactagcctggccaacatggtgaaacaccgtctctactaaaaatacaaaaattcaccagctgtggtggcaggtgcctgtaatcccagctattcagggggctgaggcaggagaagcccttgaacccgggagacagaggttgcagtgagctgacagagcaagactccatctcaaaaaaaaaaaaaaaaagagatgggttgggggtaagagaagaagtaatctcagtttagcttatcacattctgttctaatcattttgactacagtttaccagagacttcaaaatttgattactggccaggcacggtggctcaggtctgtaaccccagcactttgggaggctgaggagggcggatcacgaggtcaggagattgagaccatcctggctaacatggtgaaaccccatctctactaaaaatacaaaaaaattagccaggcgtggtggcgggcacctgtagtcccagctactcgggaggctgaggcaggagaatggcgtgaacccgggaggcagagcttgcagtgagccgagatcacaccactgcactccagcctgggctacagagcgagactctgtctcaaaaaaaaaaatttgattactgctcccctcccaaagataaaaatctagcatagaattaattcatgccaaagatgtcactaactggcattcttttaaaaaacctcagtatctgaccctcaacagcttgtgacactggatatctagcttctgtgtgtaccagttcctcatctgtaaaatggggttaaaataataaactatatacttacttcatgggtgtggtgaagaatacatgagattatgagcttgaaacatgataggtactcaataaatatttgttgagtgaatgagtaaataaactaatgtatgaaaaatgcttaggatagtgcctgtcacatagccaatggctaataatatcagtatcacgccagacgcggtggctcatgcctgtaatcccaacactttgggaagccaaggcaggcggattacttgaggtcaggagttcgagaccagcctggccaacatggtgaaacccctgtctctactaaaaatacaaaaatgagctgggcatggtggcatgcgcctgtagttccagctactcgggaggctgagacagaagaatcgcttgaacccaagaggtggaggttgcagtgagccaagatcacgccactgcactccagcatgggcaacaagggtaaaattccgtctcaaaaaacaaaaacaaaaacaaaccaattactacattaccctgtaatattctgatgtagtttcatcagaaaagccaaaataatcactgatttaaaatacacagtaggtacctcctaaaaactaatttaaatttaccacttaatttgaaatatgtactgagttaaatcaactaagttgctactaatttaaatttgcatttaaattggcttatagaacattcttctgcctttaacacaagaggaagagtaactactgagagagcttacccatcagacaaagcagctttaagcagatttaattggctcaagatttgctttgttgacatcaaaataaaatgttagtcaacagaaaattcaaataaagtactacctagtgtcttgtttctgttagtaattccaatctgagaacattaaacaagcactgataaagcattttttctaagaaggaactctgcatagttaattctacaccagtgacaagttccaaaggagaatctgctttgtggcattaggactggactcctgtactttcacaccctaatagtctctatatcgccggaagcagttggtgcactcccggcctttagattagagaaaatactaagcaggattctaataaaaagaatccaagttaataagcttaagaaattaaaattgctacctatacataaatatcattggtcatcaaaaactctactaaagacctactatgtgccagtgaaaataactgaggagggcattagctaaaacagcttctgatcgagaagcttccagtcaaattagctaattaagatattaatagaagctggtcaagttaaccaaaaatatgaggggtactggcataacaagctacaagatttctgagaaaataagaagcttttgatacaactaggtaaaataagatatgtgatagtgtgattttccatgaacacaaggtggtactggcaataaatgctataaaattttagagaagaaagattaactgttgcaaaaccatgatagacttcaaagagggagaactgagctcagtcttgaggggtggaaaagatttaaatagttaaacagcataagaggaaaggacaaaagataatgggaccaaaggtgctgaattgggaatatggccattaaatatttattaaatacctactctatgtcagtcactgtgttaggcactagagatacactggagaacaaaacagatgagttctctgctttcatggaatctagcagggaagacataataatcatgcacgcagatatataatcataaattgcaataggtgctatgaaaggaggcaacagaagccagtaatagggaataatgggaaaggactagcaagacacgatgatgagaaaaagtatccctgatatttatacataagctcaggcatgaaggcagccatgcaaagagcagggaaaagaagtgttcgaggaagacagagccatgcatacaaaggccctgaggtaggaaacagctcactgagtttaaaaataaataaggccagtggctcatgcctgtaatctcagctactctggaggccaaaggacagcttgaggccaggagtttgagaccagcctgagcaatattgtaagaccccatctctaaaaattaaataaaataagaataaaaataagaagttagcgtaacagaggcataatgggcaatgagattggcataaaatgccaattgcctacccgaaaagtagccaggagacgggctatacagggcattataggtcaaaataaagaactgaaatggccaggcacagtggctcacgcctgtaatcccagcaccttgggaggctgaggtgagtggatcaagaggtcaggagttcatggccagcctggccaacataacatggtgaaactccgtctctactaaaaacacgaaaattagccaggcgtggtggtaggcacctttaatcccagctacttgggaggctgaggcggagaacggcttgaacccaggaggtggaggttgcagtgagctgagatcgcgccactgcactccagcctgggcgacagaacgagactgtctcaaaaaaaaaaaaaaaaaaaaaaaaaagctgaaatttgaattttattccaaatctaaaaaccactaaaaatttttgcacggtcacattagtgttaaataaaaggagccagaccacaaacaatatatactatatgattcaatttttacaaaagtacaaaaaaagagcaaaataatctatgctgtcagaagtcaggatggtgattaccctgggtggtagaggggagacaggaactgaaagggaactggataggggcttctaggtactggtaacgctgtttcttgatctagatctaggtgctgcttacatgggtatattcagtttgtgggaaaaaaacatcaaattccacttttacatgcatttttctgtatatgtattatatacttcaatcataaagtttttaataacgtaatatacttttattttttttttttttgagacggagtctcgctctgttgcccaggctggagtgcagtggcgtgatctcggctcactgcaagctctgcctcctgggttctcgccattctcctgcctcagcctcccgagtagctgggactacaggtgcctgccaccatgcctggctaattttttgtatttttagtagccacggggtttcaccatgttagcccagcccataatacatttttaaaatactattttgtccagataaaaacaggaatagagtgctcacttccacaacacaaatactaaaattggaatggtacagggaagattagtatgtgccctgcacaaggatgacatgctaattcataaagcagtccatatttttaaatttttttgtaaaaataaagaaacaaacggtataaaggggcacatgcaaatacggcaggtcttgaatgaaagattacccgggtagaagctttcagaggagtaattcaaacagccagtgatacaaagtaccatgttaataaagaataaggctgggtgcggtggctcacacctgtaatcccagcacttttggaggccgaggcaggcggatcacgaggtcagcagctcgagaccagcctggccaacatggtaaaaccctgtctctactaaaaatacaaaaattagctgggtgtagtggcaggcacctgtactcccagctacttgggaggctgagggagaagaatcgtttgaacccgggaggtggaagttgcaatgagccgagatcacaccacttcactccagcctgggtgacagggtgagactctctcaaaaaaaaaaaaaaaaaaaaagcatgttggggccaggtgccactcatgcttgtaatcccaacactctgggaggccaaggtgggagaatcgcttgagcccaggagttcaagaccagcctgggcaacaaagcaaaaccctatctctacaaaaaaaaaaaaaatgtttcttaattagctgggcatggtggtgcacacttgtagtcccagctaatcggaggctgaggaaggagaactgcctaagcccaggagttcaaggctgctgtgagctatgactgccactatactccagatcgagagaaagagtgagatcccgtctcttaaaaaaaaaaaaaaaaaaaatgctgagtctgggaaggaagttgtgcaatactaaaggattaactatcaattccttagaacataaggaggaatctccagaaattaagaaagtcatagatgacaacagcaatgcctaaaaaggttagcaatgcttgtcatgttgtggctcatattttaatatggtattttcaagctcttcccttgaccctccactcccatacaactgagagtgtaatgacatagaccccaaacctgagcatcaatcatacctgagctcgaatcaatggtctgcccctcacttgctctggcagttaactgctctgagctcagttccctcatttataaaataaggataatgactacctcatagagttattattttttcaaaggtgaacagagtagtcacttctgcagcacaaatactaaaactggaataatacagagaagattagcatgtcccccgctcaaggagggaacactattatagtcacccctttgagtagatctaaagggttattttaattattatttcctaatggtatacggaggaccaatggtggatttaacaagaattcctttgcttcgggcagagcaaaaaaaaaaagtttccattctcagacaaatccatgggtgagagaagggcttataaaatagtcaccggctgggcgcggtggctcacgcctctaatcccagcactttgggaggccgaagcgggcggatcacgaggtcaggagatcgagaccatcctggctaacgcggtgaaatgccatctctactaaaaatacaaaaaattagccgggcatggtggcgggtgcctgtagtcccagctactcgggaggctgaggcagaatggcgtgaacccgggaggcggagcttgcagtgagccaagatcacaccactgcacttcagcctgggtgacacagtgagacaccgtctcaaaaaaaaaaaacacagtcaccatacagaaacagaatgaataaagataaaatcaaaaaataaagagaaggtagaaatggggcttcttctagaagctcactagcacaggttccaggcattttctaagagacagagacttgagctaaagcatactgggagaagttcagtgacttgagaaattatgaaaaggaagaaacaatcttccccgcaagccacaattgctacctaatgtattcttccctttgtggaatattacttaaaacaagttagagatcaacactaaggatattctgtcataggtggaagggcaaggccttcaaccactttacaccatccccacccttaagtattatttgaacaaccataatttgttaagcgcttcttaagcacagccaaagatgttaagttttatatttcaggagctaccatttcaaaagaaaaaaaataaaaagttcaactccttaaatcttttggtaactttttccccaaaatgtatcctctgtcttaaaagtaactaaaatctacttcctcctgaatttatttatctttcccctaatccaataaatgtctctccttattcttcctatttacctcaccattaaataccgaaggttttcctatttcctcccaagttggcacattaacactctaatattcattctgatctcacagtattgaatctgagcatagaaacctcataacattcccagggataaatctgctacccaattcctaaaagataacacacagtttaaaaaaataaacacagtggtggtaattatacaactgtatacatgtgtcaaaatttgtcaaactgtacacttaaaattggtgaattttattgtatgtaaattatacctcaataaagctttttttttttttttaaagaatgcattccgggcagggcatgatggctcatgcctgtaatctcaacactttgggaggctgacatgggaggatcccctgaacccaggagttccaggagaccagcctgggaaacacagggaaacctcatctctataaataaaaaaaaaagttagccaggcatggtggcacacacctgtggtcccagcttctcagaaggctgacgtgggaaaatcacttgagcccaggcagtagaggatgcagtgagacatcatcacagcactgcactccaaaaaaaaagggaatacattcattacattcattcattcactcatcaaatatttgctatgcatctattatatgcatcaaagtttataccacatctttcagcctggactatccgggtcctacctgtaacagcatgctttactcataagttgacactgtccctaaaagctgtattacatgaaaaatgattctgtttctgataatgttaccttaatgatggccgctttacactggaagggccattagctatccatcaacttccattacataaatgaaatatatgatcacttaggtactccccattttaacagaaatgctttcatcataagaaataagtaagcacctagaggcatatagtacataccactactacactactacagccttatatgtttgtctttttaccaaaaaaaaaaaaaaaaagaaaagaaaaacagcacacttcaagtgcatatttacaacactgctgaaagaaaaggcaatactattggagaatagacttaaatgacttattctagggcccacagtcacccagtggctgagtcaaaggccaaaaaactaggtctcatgattcccaaggcagtgggcaaagtagagagacaaccacagacctgagaaacagacctgggtatgaattccagtgccacttcttactagttgtgtgtgtgaacttgggacagccactttactttctgacctttggcttgctcatctataaaacagggatgctgactgggagcggtggctcacacctgtaatcccagcactttgggaggccgaggcgggcagatcacttgaggtcaggagttcgaaaccaacccggccaacatggtgaaaccccatctccactaaaaatacaaaaattaaccgggcaaggtggcacacacctgtaatcccagctactcgggaggctgaggcaggagaatagcttaaacatgagaggcggaggttgcagtgagccgagatcgcaccactgcactacagcctgggtgacacagagcactccgtctcaaaaaaaaaaaaaaaaaaaaaaaagggatgctaactaccacctcacaaaattcttgggaagactgcctaagatctataccacctagcataattactgggtacagaataggcaactcaacaacattagttccttttcttggtcttaaattatttaagattaagaaaacacctcataatcaacgaaggctaattaacaatccgcattattaatcactggtcaacaatgaacctgtgtttgctgccttcttcatactccaacccattcccttcccagctcactatttccagcttttcaaactttagttactatgtttagaaaagtgatttaattttagaaacctggaaaattcttctaggagtaaattcttctaggagtaaattgagcaaaaccttaatctgcccccaggggaattctgagcaaaacaattatttctgacaaaagaagaattttctatgggggtaattcaatttaaccacatgaatactaccaaagttgcaaacaaggtgacagaaggcaatctggaacacaccttccagattccccaaaaagaaatgtcctcctaaaatccaaacccctccctccctaatttgaggtagtcaaatcttattaggtgatctgaattctcccggctctgacaccagtccagctccttaggccagaactgcagccgtctgtaaaagaaataccctgagcaaaccccacccctcaaaacatccccaaaaggcagggaggtccagagagtattttctcctccaacgacagataaggcaccaagggctcagcagcgcaatccttctcccaaggtcattcaagtcagtgaaggtgcgacggtggagctgcaggcagtctggccttctggaaatcacactacaggggttttgggggtgcctactctcttcccctctcccacccgcaagggtgagcactggcctcggcattcccgaaacaagccacaacaagctctgcagtgttaggaaaggggttgacgcgatgaagaaacagatgctccaaagcaagatggtctttctcggctcacagaggctcctccaaggttatgcacagaaaccgcagccacctccaagagctctaaaccgggctccgaagccccagcgcggccgctgcgggtcgccaggttccctgcaggcaggctccgcagccagaggccaccagccccagaaaccgcacttcattcctgcgctccgggaagccatggctccttccctgcccgggcggctgggcgggggccgggggtgcgccgggaggcgggccccgcgctgcggaaagttcaccgcggcgggcggggggaggccccggccccgctcgccggcgtccccctgcagattccaccattaattagtcctaaggactgtctactggcaacttaaacaaagcgaatgcctcgaattccttcccggcccagcggtctggctgcgagaccagcagagcgcccgggacgcgggccggcgcggccgacagctgcggcggccgcgggacccctccccgcccggcccgcggcccgcgccccgcgcccgcagctggccccgcacgccggcccgacgcgctcccaaaccgccctcctcctcctgctgctgcagctcccgggcccttcctgtctgatcacttccttcctccggtgcccgccgggccccgcgcagccccctccacggccgcctcgtcgccccccgcccctgtcggcccgcgccccctcccccaaccccaaactctacccccgaaactcttcgccgccccctcgaaaatgtctcctccgcgtctctgccccaaacatttctcctcagagtctcgctcccaccaagaagtctcctcagaaccttccctccccctcccgaggaaaaatctcctcagagtctcttcctccaactccacaaacatgtgctgggtctcgccccaaaaggtctcctcctgagcccttcctccaaaatccattccaactctcccccaactccacaccccatctctcctcggctgcgcccgcggtttcttctgccccgtggccgcgggtgccccgacctcacccgggaccggcctcccaaccccgccgccctcccctccccgcgccgcgctcccgccgccgccgcctcacggaccctcacctctgcggccccgaaccgcgctcccgccagcgaagggttccgccgctcagctgccagcgaccggcgcctcctctggctccgcgggactgacaatgaggggcggggccaaattgtgacgtcagcgttctggaaggcggggtctttgtgatgggcggggttgtctgtaggccccgccccctccgtcctttttttcccttcccaggacttagactccaccaagtttttattgcctccgtagctgggtcctgtgctaggcgccctgggaaatcgaaatggaagacaagacttctcgatttcaggagggacactttcggcccgcgtggtggctcaagtctgtaatcccagaactttgggaggctgaggcggacggatcgcttaaactcagaagttcgagaccagcctgggcaacatggcgaaaccccatctctataaaaaatacaaaaattagccgggagtggtggcgcccgccggtaagctaaagtaggaggatcgcttgagccgagggaggtcgaggctgcagtgagccgtgatcgtgccactgcactccggcgtgggtgacagagtgagaccctgtctcaaaagaaaaagaaaaaagcgggacactctcagtagggttgtgaggattaaatgagataatcaatggaaaggtgcttagcctagaacctgatatggaataatcactcaacaaatcctatttctattactctgcaaatgcagagaaggaactcagctcagactcgggaggcatgggttcccgtcccccactgtgctattaattctttgtgtgatgctagacaagtactttcccatctatgttcccgattttcatcttctttaaaatgggaagggggaataaccagatgatctcaaaatcccctcccatacttctatgacatacttcctttaagtctactatctaaaaggcacctagtgccctgagaagccaggaggaaggcttcaaagacagcccaagacccacacccagcatagtacaggacacagccagagactgctctcgctgcggatgccctcccacacgctggcacgcagcagcattcacaagccaggacacagatgggctgagggctgcttcctctctgactacagcagcatggttggtctcttgagacatctcttgtgtaagctctttattgcctatggaataaaggccaaagccctggcctggtatgatcacttcctacctttacacacacacacacacacacacacacacaaagtttatccaaacttctcttagcacacccactgctttcccacatttgaccctttgctgaagctcttcccctgctgtctcacctcccagcttctcccagccagaaagcaatcctccctgttctgaataaccaataacattgtgtttaaccctcacgtgggcatgaacactacaacttataaagaactgacctcccatttgtttcttagcacttcctggaggtcagaacccacacatgtttgtggagctcaagctctgatgccagaaaaccctgggatcatatgttctggggtcataatagccatctctgagcctgtcttctcatctataaaatggggataataatatagtcttgtggtgtttgttttaaaattacctaagatactgtatggaaaacatcaggcacagtgttccacaaacaatatgaacaatatgattgtcattcttattttctttttctttctttttttttttttttttttttgagacgaattttctctcttgtcgcccaggctggagtgcagtggcacgatctcagttcactgcaacctctgccttccaggttcaagagattctcctgcctcagcctcccaagtagctgggattaccggcacttgccaccacacctggctaatttttgtatttttagtagagacggtgtttcaccatgttggccacgctggtctcgaactcctgacctcaggtgatccactcaccttggcctccgtaagtgctaggattacagacgtgagccaccacatcaggcccctgtcattcttattttcagtagtattatattgaccaggcgcggttgctcatgcctgcaatcccaccactttgggaggatcacttgagtccagggggatggatcacttgagtccaggagtttgagaccagcctgggcaacatggcaaaaccccgtctttacaaaaaatactaaaaattagccaggcctggtggtgcccgtgcagtctcagctactcaggaggctgtggtgggaggatcccttgaacctgggaggtggaggctgcaataagccatgataatgccaccgcactacagcctggtgacagatcgagaccctgtctcaaaaaaaaaaaatatatatatatatatataattactgtatgatttatatatgtatttttatatataactactataatcagtattatttctagttattaacaccacacagcacctcataacaatccacctaatcatttcatatggaagactttagggtcttgagaaaggaagaggcttgctgaaagtggccctgcaaagcattcccattggaatggaaaccagcactccagtctgcagaccccagatggattcagcagagtcacatctgatgatgccccagggcatctctgccattcagcatgcctccaagctggggtcagcgtgtagttctctctgagagttctttgcagcacagctgacccatttctgcttcatgcctttctcctctcaccttctttacagagacgtggatctgtgttaaaccgcccttggcatctctgcaatcctctaggagaactgcaatgaggcactgggcatttctagagcactggcctgtggaaggaggggaggaactttggggttctgattaatttcctatgctgcaggcaggcacatgggtgtcctgaaatgcctggcccggtcttcaaaggcctctaataaattatagcttatttttagaaaaaatattcaaaaacaccacttcctgtgaaaagtaatcatggctgtaagattgctggaggcaaaggaagggcctttactgagttgctcctaagggctaatgctgattccaagtaccacaaacccttggaaggaagaacccaggacatataagggaggttctgaagaaagaactttctccccaggacccatgatcccagcaaccacttattgatttattcatagcaaaagctttggcacaggaaagatcgggattcaaaacccagctctgccacttactagttatgtaatcttgggcttttaggtctctgcacctcagtttctcatctgcaaaatggaaataataatactacctttctcacacagtgcctgtgagggttaaacatgtgaaagagctgagttcagagcctggcacctagttcatgccaggatatagtggttgctgttactatttgaacatgtcctcatcctcccagcaagacctccattagtaaaaggaaaggaatagatttgtatgattggacaataaaggtctctattgggcattgttaagtgaaaagagtaagagtaagttgccgaattacaagtgtagtaggatcctgtagttatagtttgtaatatatgcttagtatatgcatagaaaaatatggagactataaagaactaaataggccaggcgcagtggctcacacctgtaatcccagtgctttgggtggccaaggtgggaagattacttgagaccaggagtttgagaccaacctgggcaacatagtgagacccctgtctttacaaaaaaaaatttttatttttttatttttttttttttagacagaggtcaccctctgtcgctcaggctggagtgcagtggcacgatctgggctcactgcaatctttgcctcccaggttcaagcgattctcctgcttcagcctcccgagtagccgggattacaggaatgatccaccacacccgggtaatttttgtatttttagtagagatggggtttcaccatgttgcccaggctggtctcgaatgcctgggctcaagcgatcctttagctttgtcctcccaaagtgctgggattgcaggcgtgagccaccatgcccagccaaaattttatttatttatttttatttttattttttttgagacagagtctcgctctgttgctcaggctagagtgcagtggtgcgatctcggctccgcctcccgtattcaagcaattctccttccccagcctgctgagtagctgggattacaggcctgcgacaccatgcccggctaatttttgtatttttagtagagacggggtttcaccatgttggtcaggctggtctcgaactcctgacctcatgatccgcccacctcagcctcccaaagtgctaggattacaggtgtgagccaccgccaggcatggtggctcacacctgtggtcctagttactcaggaggctgaggagggaggattgcttgagcccaggagttggaggctacagtgagctatgatctctgcactgcactccagcctgagtgacagagaaagacactgtctctaaaaaaataaataaataaaaaagagctagagaaccttcagttttttttcttttttttttgctttgctgagtttcattttgtttttgttttttcttttttttttttttttttttttcagatagagtctcactttgtcacccaggctaaagtgcagtggcatgatcttgggtcactacaactcctcttcccaggctcgagtaatcctccaacctcagcctcccaagtagctgggataacaggtgcctgccaacaagcccagctaattttttttgtatttttggtagagatggggtttcaccatgctgcccaggctggtctccatcttctgagctcaagccatccacctgccttggcctcccaaagtgctgggattacaggtgtgagacactgtgcccagcctgttttgctgttctgtgtgtgcatatagtgagaacttccaaaaaagactttgctatggaggggaaagagggtaaaaacacagctacaaggtataccagcagtgggcatctgagccacctgtgcatactgcaatagaaagttccacagatcccatctcctccttcgtggggttccaagaaagcccatgccgagatgattttcactttctcccctgaccctagcccttggttgcatttgaactttcaatgctagaagccaaaagtaagacacctaatagaagtctcaggaaccatgacaaggccaggacaaaaagaattttaagcagggagaatttttttttgtccctgtctgtattagtcagagttccccagagaaacagaaccaataggagtatatatatatataatttacttattatgagaattggctcacaagattatggaagcagagaagtcccacaatctgccttttgcaagctggagaaccagaaaagatggtggtactaagaatgggggtttgtgggcagggaagtgctggtataagtctcagagtccaaggattgagaaccaggagctccaatgtccaagggcaggagaagatggatgttccagctcaatgagagagagcaaattttccttcctcctcttttttgttctgttgggccctcagtgaattggacaagggcccttgttctttgggccctcagtgaattggatcatgcccacccacattggtggaggcaattttctctactcaatctaccaattcaaatattaatatctcctggaaatactcagagataatgttttaccagctatctgggcatcccttagcccagtcaaattgacacataaaattcaccatcacactgtcctatgccccctccacaccttccaaagaatcacaatatgtcagcaccttgtgtctaccatgtctaaacttgcactttcactttcactcattatatctttctgcaatttaattttttacatgtagaagtattactgtgtcatcagaaaaaaaggcaataaagatatacataaaaagaaagctaaccaagctggagttggctcacttttgctggtttgcaaacaacaaatgattacccagtatgattgaggccagtgcaaagtctgccaagaatcatagaaagtcagaataggaaggaataaaatagccctcaattctcctatcatccccaaaatggcatgattttaagttccctctattcctttcctccctcatgtttcagggcaaccgttactacatgcatttcattcattcattcattcattcattcattccacaaacatttatagatcctttattctgaaccaagaatcatgctgggtactttacatatactacctcttaaaggttataggggtcattattgctagtatattgcatatactatctcttaaaggttatagggggtcattattgctatcttgcagactgggaaaacaaggctcagacagggaaagtcacttactggtcacacatctagtaggatctaaaccaagacatgtgcaacatcaaagcccaagtccaggaggaaatggactgtattccaaagcaaataagctatgcactcaggcagccattattggctgggtggctttgggcaagtcattgaactcttctcagcagcagttttcccacctctgcagagtaagtgtatacccacctatttcatgtaagctaagtgctttgtaaatcgtaacacataatacaaaggaaaggcatctcagctcttcagggactaggtctcactcgtctttggaccttttggtgctttcccccctagtgtttgcctccattagtgttcatcccccattagcgcaattaggacagtcttcctctcatgcatcttatttctccctccagcctgggacttcctcgacgacaggaatgatgcttattaatttctgatccctttctgtccctagtacagtgtctggcctgcatccctccattcctttacatttttatgcatttcataagaaatggctgagtgcctaacatgtgccaggcactacacagactgtaatacagcaaaagtcccaagtttcctggactggaggagtggagaaacaggacaacattaaacacaattacttaataacaattccattaagtgctgcaaagaatcaggtgatatgccaggagggattgggggaatgcagggtggggacctaactgaattgaggagccagagaaggcttcctagaagaggtggcatggagcctcagagagggtaaggaacatgctcaaggtcacacagctggtaagtggcaaaattgggattttaacccaggaatgcctgagtacaaagcccatactctactagaaaacactgtctcttatctgtcttttatttcctccaccttttacttccttgacttttttttttttttttttagatggagtcttgctctgtcgcccaggctggagtgcagtggtatgatctgggctcactgcaaccaccacctcctgggttcaagtgattttcctgcctcagcctcccgagtagctgggattataggcgtgcgccaccacacccagttaatttttgtatttttagtagagacggggtttcaccatgttggccaggctggtattgaactcttgacctcaaatgatctgcccacctcagcctccccaaaagtgctgggattacaggtgtgacccaccatagcccagccccctacttccttgacttttattgacgagaaaggagtaagacctgtccaaatgaatgctctaaagcaatattttttcccagcttttgggggatcacagattcttttaagaatctagtgaaatccatgaaacctgtctccagaattccatgtatacagacagacccacaaaatcttgcatacaatttcagggagttcataggcattctgaggcccaggtttagaattcattccatggaggaccatccgaccttatagtgagatgtcagaacctcagaaagagacaccaggaccccataaacagctcaaatccccagagagatctcaagaccctatagaaagagtctcaagatccagtagaaagatctgggatcctgtagaggcccccaagttgctacagagtaacagctggggctttgcagaaatattctcaagaggctatagacatagaggaacctcaacctctcatgaagctggggtcctcaaagcagacttggagagctataattttggggggttttttgttttttgttttttgagacagggtctggcctctgtcacccaggctgcagtgcagtgacacaatcacccctcaccacagtctcaaactcctgggctcaagcaatcctcctgtctcagcctccacagtagctgggactagaagcgtgtgccaccacgtccagttaatttttaaattttctgtaaggatgatggggggggggtctcactatgtttcccaggctggtctcaaactcctggaatcaagcgatcctcccacctcggcctcccaaagtggtgggattacaggcatgagccaccatgccctgcagagggctataattcttaacccttgttggatcactgacgcctttgaaacttcgaagaaaaatgcaacacacacaacatgttacacaattacaaggggttcacagacctctgagaggacatcggtagccccagggtacagaactctggttcttgaggtgcggcaagaacgtaacccccgccccccaaacaccccaaaaacctggagcagaaccacagacccgaggcacaaactttaggatgaaacagaccccgagttgcatcctggccctgccgtttactagccatgaccttgaacactcacctagaaaccctcaggcctcagcatctcaccacccaaaagagagggctggacacccttccctccccagcctggcccccgcggcgtgcgctccgtgacgggtggggcgctggcgcttgacaggactcagcctctctcccctcctgcgccagtgagccatgaatccggctgcggcacttcatgaaatactcatgggccgactgcaccaggcttgcgggcggcgggggagggggccggcgcgttcgccgtttgccgcagtgacagctccgcgccgccagccggccgcgggcctgggaagccgccggtgccgggcgcgctctcggcctttcccacccaccaggcagggcgttcccgccagccggcttcctgcagccgagggccggggaggagggacggcgctgaggggccgcagggcctggcaggcctggttcctggctttctctccgcgtttcctgagcaggaccggccgggggatgggacccagcgcaaacctcctaccccgggagcgcagccaggaaatcgcgtccttgttaattcaggttcctcctttgcgctgaacggggctgctttccgtccgcgatcaagtgggcatgatgcgacccacttatcccaggaggaagcggagagacgaaatggcagctcccgaccccacgacacagcaagattccaaccccatgatgtcagtgttaactccatcctatggatgagaaagctgaggctttgaaaaatgaagtgacttatccaaggtcatcataaaaatattactactaataaaataacatgcttactacataccaggcactgtgctacaaatactccaggtgttttttgtcattgggttcctgtaatctatgaagataactgttgttcctagttcataaatgaggaaacagaaccagaggccaagtggcatctccagtgatgcacagctacgaaataacagagctaggaattaaactccagcctcctgtttccagagctcagcctttctctatcctgcttcagcacttcagttgagtaaccatgaccttgtctcatttgtttctgggtcctcagagccttaccgagaacttgacacaaagtaagtgctcagaggtgactaagggaaccttacatggaagttcacacttagaaggactgataggaggcatctgtcacgtcaccctttctagagccttcagccaagtgaaaacttagcctctgcctgaatactcactatcatgataaactctccccctctccacacccccatcccattcccttgttggacaaatagatttggtttaaacgtaaatgctcctttttttttttgagacggagtttcgccttatagccctggctggagtgcaatggcatgatcttggctcattg

SEQ ID NO: 426 - DNA, 59676 bp, Homo sapiens
tctggtgatcaataggcaaacggcatcagcattattgctcatctatcacactctttctaaaaatatggactggcaaacctttttgacttctgtaatattcattatttcaggaagatttttcagagaaacctgatgaccttctacttgagatattaggtattcttgatttatttgtttttctccctcttcaatgtaaacaattagaattgaagtgtcatttgctgagataccaaattttttcaaagcctctgaaatctaagagaaaaaaaatgaaaaaaaaaacacaagatcattaaccattgtttcctacgtctgaaacatttcctgatctgccttcttccttggtcaggctcttatttttcatgtcctaacagttctcactgcctactttttcactttaatgattcctttccaacatccattggcacttcctcaaaagcactccctgcttaaaggtacgccttgttcctatggaatcaagcccagcctcttggcgctgcacaaaaacacctcctccctctggtgccaagtggccctccagccaggcgcttctgccttctggccagtccagcctgcctggggatccagtcacatttcatgcccttctgcctgtgctcaagctttgtcctctgctcgcatgtcccttctcctcatggcttggctgctgaacacatgcttcagggtccacagttctgatgccactccccaccacaccctcctccctccaaaatgaatggcttcattgctgtacccctagatttgaattcattttcccattatatcatttatcttagggcattttaacttgtcttgtttatctgcctctcctcaggaacatatttgcctcttctgcccctagaactgtaaatggaacggggaaaaagttcaacagatgtttactgaattcaagagttttctgaattatgtctaatgatctcaaggaaaccataattagtaaattttattccaggtactgggaatctctattaccatgctgagataactgcattttataaacttgtcaatcatctgtattttaacctatgctacaggtttcctgtagatgacattagtacctggttgttattaacagcagcagtaatactaaaacttcatcagcaaaattgcagtcatttttttcatgtgctacatgtgtgatgtctttagcttgataactttcattgaaaaagcattactataagtatttcaaaccacaaactctacctatgtactgggtgtgtgagtgaggctgtgttaaggactgttataggtacaagcaagttcctggtatatgaaaaagacatggatcccaccctcaaggagtttacgggaagagagaatgatatgcaggctagcacacaaaatatccacgcctaatgttttatcatttagatttctgtcagcttctcaagcaaaaatacttgaggggtcttcctgaccctatatggtaagaacagataaaattaacctcgcttaatttagctaaatttttgtttactcatatgtaaactgtcttagtaagaggcagggttaaacctcaactctctgtccagagctctcttcactattatttgggtttattactaaccactggcttgcaggaatttagcctccaacccaacactgaggaacacatatgttattatgacacggtcaacagaaataggaaagtgcacattacattgttatttggggaaaggttgaaaataatttcagtagatagagttcttgtcttcatttttcccagtttgtagaggtgaactgctttgtttgctgccacaagtatctgaaatggatcaacaatctaccaaagcaaggaaaaagaattaattacacatggagaatctgcagtgcctgaaaacacatggtaactcatggttaactccagtgtcaagctgttttacttcatcacaattcttacggtctgtattttcaaaactattatcccggctgggcacggtggctcacacctgtaatcctagcactttgggaggccaaggtgggtagatcacctgacgtcagggttcaagaccagcctggccaacacggcgaaaccctctctactaaaaatacaaaaattagtcaggcgtggtggcacgcacctgtaatcccagcaactcaggaggctgaggcaggacaattgcttgaacccgggaggcagaggttgccgtgagccaagatcgcgccattgcactccagcctgggcaacaagagtgaaactgtctcaaaaaaaaaaaaaacaaaaaacaactattatcccaagggcctgggtagtcaggaaatcacagaattttaaagctgcaaggaacttatgcaaatagtaaaatttttttaaataacattaattgagggctaatattatgggcatgatcatattgcaaacattttacttgtaatattttctttaatcctcaaaactaccctatgaaattgacactattattagtagtagtagcagtagtagtagtatgtaattgatgaggaaattgaggcaaagaatgtctgggtttgaatcccatctctgtcacctatcacctaggaaacttatgcaagttcattagcattttatttgttagagaccgatgaaacagtattcactccataggctgttgtgaagattaagcaagttagtatacgtaaagcacttggaacaatgctaggaatgcagtaagcactatataaaggttggttatgtcttgttcaaaggcctaagtagtaggtctgggattaattcccggtaacatgatcgcactgcgtgtgccctgtttttttgtttttttttttttttggagacagacagagtctctcgctccattgcccaggctggaatgcagtggctcaatctcaattcactgtaacctccgcctcccaggttcaaatgattcttgtgcctcagcctcccgagtagctgggactaccagcacacaccaccacacccagctactttttgtatttttagtagagacacggtttcactatgtaggccaggctggtctcaaactccgggcctcaagcaatccacccaccttggcctctgtgtgtactcttaaccactacactattcctcctctacagactgtcttgttaggaacccccattttaaagatgagaagctggagatccaggcatttcccatattagacccagaccacaacctttcctatttcctagggcaggacctggcacttctgcctctattcactgttatagtcaaagttggctgcatctgacttggacaagaattttttccctaaccgtgacagatttttaggctaccctataacatcacaaatattaatgtatacttaaatgccctgtatggctcattcattctttttttttttttttttttttgaggcggattcttggtctgttgcccaggctggagtgcagtggcacaatctcggctcactgcaacctctgcctcccaggctcaagcgattctcctgcctcagtctcctgagtacaggtgcccaccaccatgctcagctaatttttgtatttttagtagagacagggtttcaccatattggccaggctggtctcaaactcctgacctcatgatctgcctgcctcggcctcccaaagggctgggattacaggcgtgagctaccatgcctggccattttttttttccagacagagttttgctcgtcgcccaggctggagtgcaatggcgcaatcttggctcactgcaacctctgcctccagggttcaaatgattttcctgcctcagcctcccgagtagctgggattataggcgcccgccaccacgcccagctaatttttgtatttttagttgagacagggtttcaccatgttggccaggctggtcttcaactcctgacctcagatgatccacccgcctcggcctcctaaagtgctggcattacaggcgtgagccaccgcacccagcaggctcattcattcttaaaatttatatttaccactgtaggatttatcagtgatccatcgatggtgccttccatggcctttcttctcaagtctcccgcattttttacatctttaaataacagaagggttaccctgcattcgggaaataggtccagctgatgtgttaactgcatttcacagataagcaggattctactgcacacaaaatgaaaagaccaaaagatttcatttaaaagttaacatcagaactcatttcttaataaatattcaaaaactttgaaagtaacttgataaaagtgttaaactagaaaaatccatcgccaaagcccatttggcatcctcatgagatgttgtcttcctaacccttctgagttgttctgttgtcatccccagggaaacgccaaggggcccagctggttgctgtttgttcagatgaggcaggctcaggtgcatggttgaagggctgcttccccagcagacaagtaggagcagaatgtcaggaattttttaaaccagaggttgcttacggtattaatgaagtcttactctatcttagtctttttaacttcctgatctcatcattttatttatattttaggaaggcctagacataaatattaaggaagaaaataattttaaagaataaagtaggctgggtgcagtggctcatgcctgtaatctcagcactctgggaggccgaggcgagcagatcacctgaggttgggagttcgagaccagcctgaccaacatggagaaaccccgtctctactaaaaatgccaaaaaaattagccaggcatggtggcgcatgcctgtaatcccagctactcaggaggctgaggcagaagaatcgcttgaacctgggaggcagaggttgcagtgagccgagatcataccattgcaccccagcctgggcaacaagagtgaaactccgtctcaaaaaaaaaaaagaatagggggaagggatagcattaggagatatacctaatgtaaacgatgagttaatgggtgcagcatacaaacatggcacatgtatacagatgtaacaaacctgcacgttgtgcacatgtaccctagaacttaaagtataaaaataaaaaaaaaggataaagtatcccacttgacccaaagatattcattccacgcatggaaattaagcagagagggtacaattattaaataatcaatgtcgctcctttcttggacataagcttaacaagaaaaggataggttattatatataaagacataaaagaaacataaaagacaacttgaataaccagaaagacatgaccatatctttgaatggaaaaactatgtattgcaaaaatttctttaaaacaatttctatcaaattcttaataaaatattttggtggggcaatttgagactcattttatccttttacctggcagattatatttctagaactctttctgatggaagtcattaggaatccaataattatataagatgttcctctcattattttaacagtaaaaagttgcaaataacctatctagctaatgatgggattagttgttatttaacaaccattaaaacatgtggtcttgacggtgtgtaaaaacggcaataaataacattaagtaagtaaaaacatctgaatggaaaacaaaacacaaactggccaaaatgtgggttttttaaaaggcttttaaacaaatattaaaaagaaaatacaccaaaaagttaatgttatctcttatttagaattaatttgactttttctgttacaaacagaaaaaaatatatttgtgaacgatatcctggcacacagttcaatcattagtcatgctaaggtggaaaaaatggatacagaaagacataatcagtaggatcccaattatataaaaagatacacatatttttttaaaatacatgaaagaaacactaaaatatgaccatcttgggtagtgaggttatgaggtgatttttattgtcctttatataaaagaaaatattttgttatgtatgttctgaattttctacagtaagcacacaaaacatgagtacacataataagaaaggaaaaaaacgtgctttttaacactgagtggggggaagaacccttagaaaacttcaaaatagtttgttcttgtttagcgtaatttactcactcaggtcagaaacttggaatcatcgttgagacccaacctgtcactcaaatcctatatctaatccgtaaagtcctgaattttcacctgctaaatatacttttgattcgtccacttctctcccatacgctaggtcacatcgctcatctacagcagtagccttctgagtggtttctcacaattcctgccctcctataatccagtcgtcaccagcagttacagtgatcctttcaaaatgtacatcagatcttgtcattctgctgctcttatgataaagccccaactttgtgtcacggtgttccacactctacgatctggtccctgcctctcctcttctgctaccgccgcaatggccttctctaagctcaagtcaccaacctttctccccgattctgccctatcggacaggtagttccctctctcctttcatctccgcctgacgcactcctccctcccttcaactccatttggagtccatttactacagcgcccagaaccccggcactacggctctttttagtctgaggactagctcctttttgggcccaatcacaactctgaagaatcctgcgcctatccgctgcatgtctcctcactaaactatttcttgaggggacagcctgactctatcattctcgtgctgcattcccaggggctggcctcgttgccgcttgagaaataccaaccgcagccgttgtcccaaagacactactaaaactgcccggaccctcccgctcccgagcctgcccgttagagcgcaaggaaaactcaccatccggcccccagtgcgtctcggaagagctcccgctccgaaacaaagctcacaacttccggaagcgatggccaatccccgtcttcttcgagccagtttccggataggccggctcggggtggccatctgtttccgggtcctggtaggaggggtgcttccgcccatggtcccgcccattcttccgcctccccaacctgggtcccgtcaacggacgcgaaggagaacaggggctgtatatcacttccggcgaaggaaatggaagaatctatgggctgggaccggaagctggggtctggttttgagtctcggctttgtcttaacctgtgttgggcgttgcaccgggcgacctcagtttcttcctgtacaaggaaaagtactgaccaaaatgagttctacatacatttccgctgctggagatttctttggtttttgagacagagtcttgctctgttactcaggctggagtgctgtggtgcaatctcggctcactgcaacctccgcgtcccggttcaagccattctcctgcctcagcctcccgagcagctgggactacaggcacccgccaccacgccccgctaattttttgtatttttagtagagacggggtttcaccgtgttagctaggatggtctggatcacctgacctcgtgatccacccgccttggcctcccaaggagctgggattagttctttttctgggccatgtctcctgtgacactttggacttttgagtttaatgctggaacaagttaaaattttggtaggtgattgggaaggcatgattatgttttgcaatgtcagaaggacatgagatttgggggtccagggatggattgaatatatgtccctgccaaatctcatgttgaattgtccccatttttggaggtgggacctgatgggaggtgtttgggtcatggaagtggatctctcatggcttggtgtctttgcaatagtgagtgagtgccaggaagatgtggttatttagaagtgtgtggcaccctccaacacagtctcttggtccagttctcaccatgtgatgtgcctgctctctcttctccttctgccaatagtaaaagctccctggggcctcctcagaggccaaacagatggtggtactatgcttcctgtacagcctgcagaaacatgagccaatttaacctcgtttctatataaattacccagtctcaggtatttctttgtggcaatgcaacagcctaattgcagggggcaggggcagggggaagaggtggggaggcatgacacactgggctaaaacatgaagaacattcggccaggtgcggtggctcacgcctgtaatcccaacactttgggaggccgaggcaggcagatcacctgaagtcgggagttcgagaccagcttgaccaacgtggagaaaccccgtctctactaaaaaataaaaaattagccaggcatggtggctcatgcctgtaatgccagctactcaagagactgaggcaggagaatcacgtgatctggggaggcagaggttgccatgagctgagatcgcgccattgcactccagcctgggcaacaagagtgaaactccctctcaaaaaaaaataaataaataaaaattaaaattaaaaaaaatatatatatatatatatacatatatatatgaaggacattctatttctgggagacactggaacagggccctggctggtctggttagtctctctctatcacaggatgctacattcccagcacattctacagttatcctagagaaccacaagtgagaaaggagagagaactaaattggtccaaggccacctggagaactgtcctgcagtctatgcccttaacccagattataccctttagcaaagctagtccgtttcatatgcccaccaacctcctagtatctggaggcggaagtttgtcttatcagatcgatgtaacaccttcacagacacaatgtcagtacaacattgttgagccatagccagaatacattttactaggcccaggaggactacatcacaaacaggttgatcaggtctgtctggagcatcaacctagtccaggatccagtgatccaggtaagaacataataggtcaaaggtgccagcccaccaagatcttattagttgtcatgatgttttgccaccttaggccaattaagtctacctccctcccatgtggcagatgttagatcctcactcagtaagccagggctcaggttctgttgatattcactgtgccactataatactggtagagtttactactggcaggacgagaaggttgctgtagcctgtgacataatggggtctgggatgacagatccagcactttcctatggtagccacagcttgggagagcctaacaaacgcgttatgcttctaggcctctgcagtcacgtccttgtggaaaaagcagactgacaggttagtgccctgccccttacacttcctgcatcctcgggtattccctacctatgtgatagaggttgagctgagtgtagtgtcccagtctgactgctgcagtcccgagagtacccattccgcttgttgcatgacccaggccttttggcttcagtcgtccagtccgggaaggtttgtcttgtacaaactcgacatgtctgataaggttacctacctgaatggaaggatcaggtgttcctggtgccactaagcctagcaccctgatactccttggtcctgtcctgtatccctgtggatttcatagaagagaggcacccgggggacgtatcacctctagatcagagtcagaggggcctgtcgggtgctctggcagcttgaaccaccggccacctacaggatgtgcactctaaatggaaaaagaaaagacaatggttgggaacactgagattggaatttcacaggtgcagcctcatcaggcagtcacctggtccacctctatccacatcaagctcagcgtttttcaagatgtgtgcagtgctgtgtttcccttgattggagaacagtgcttagtgtccacactgccctagtcaggttgaggtgccaccccactaacaggctgtcctgatgtcctttattcagttgctttgtgagttgactggtccatcattcaatggctccattggcctgtggatgacagagtgcatggaaaacccactgtattgcatgagtgtgcccactgtcatgttgcttgggcagtgaggattttccttggtcagagtgaagtcccatggggtatccaaaaacataagtcctctcaagggcagctgtggtagtcagagcatccacatgagtggcatatagagtcccttccaacagcaagctgttgccatagcccttgtccccacacatggaatcttttaatagtccaatcactgctgccattcccctgaccagatggctaggctgttggcaatggcccatgagtcagtaaaaatgtggcaagatatggtggtaggtgggaggggatgtgccccactgttatggctcaaatccttagctgttaggggtcatagcccctctggtggcagtgacattctgtgccacaagccaccaaaatgtcaatgcctataaagcactcagtggtgggaaccatggtcactgacacctgaaatggcccaaaggcctccacccacaagcagataagcaccacaagcagataaacactatgtgtcaccgagttcatccccaaacttcctggtgtcaccagcttaatttttcccctaaaggaacctggaaattctgtcatgtggccttcagtatccaagaactcgaaagaaatcagaatttccatctttccccattttatttatttattttttttttgagacaggatctctctccattgtccatgttggagtgcagcctcaacctcccaggttcagacaatcctccagcctcagcctcccacatagctgggattacagaagcacaccaccacacctaattatttttaaattttctgtagagacgaggtctcactttgttgctttggctggtctctaagtcttgggctcaagggatcctcctgccttggccccacaaagtactggaattataggtatgagccactgcacctggccccattttatcttaataggagtatagagccattggcctctggtggggatccagagaccttgggccccattcctacccgtgccatacagcccaagacatttgggtttgcaatgtccctttatcaaatatattcatcaaccaggatgcatgtgacttccttggcctttctccatgtctaagactgtggtcctttagacttgagtctccctttctgtgacgggccacgttgtgcatgtgggttcctctcagatgcttcagggaccatgtgagtacctcatccctcttctttctcttaagtgccttagggtatgtttgggtccccaatcatcagccctggaaatgagcaatcacataagtggctaacaaccaagggatcctgtgtggcatttcagctccaccttactttctctctgcttccacccattcagccagctcagtcacatccacagggtgtgtttgcacgtgacctaatgtctcacgtatcacccctcctttcccataaaatgtccagttgcaagtccagcctctgcacccacaggttgacatcaccacctcctttcaccaggaaaacatggttctgttagactgaaccctgtttgttgtgtcaattttgtgaagcaggctcattgtgcactggttatcaacttgcctgagtccaatgagatggtaagatggaatgcccacacacaagttacatgaagtgggtttattacttacagattggccctgaggcacaacagaagcccggaattcattgtgagccaatctcccaaggctcaagaaagctaccgagggtggatggattctcacaagtggggcatgtgtcccacttgcactgcagctgagggacactagaaagcatcccacactggatttaataccctggggaccacatgacacgctgggcaaaagtgttgatggacatcttgtttctcagaggcagacaggaacagagagagcctgtgagctgttcttgtcagtccctctttatcgcaggatgttgcattcccagcacattctacagttattgttgagaacacacgtgagaaagagggaagaactgggcgagtctaaggtgacctggagaattgtcctgcagcttgttcttgaatgttcatatcaactttactcataatagccaaaaactggaaataaccaatgcccaacaatacattgataaacacattgtggcaaattcatacagtgagataccactcagtaatgaacaggaatgaactgcagatacttccaacaatacttgcaacatggatgagtctttagaatgtgctcagcaaaatgacaatctaaaattaattactaggctgggaacggtggctcaagcctgtaatcccagcactttgggaggctgaggcaggaagatcacctgaggtcaggagttcgagaccagcctgtccaacatggtgaaaccctgtctctaccaaaaagtacaaaaattagccgggtgtggtagcaagcatcggtaatcccagctactcgggaggctgagacaggagaatcgcttcaacctgggaggcagaggttgcagtgagccaagattgtgccactgcactccagccttggcgacagaggaagattctgtctcaaaaataaataaataaaataaaataaattaccatatgatttcatttctacaaaatgctagagattacagatttattatggagtgactgaaagcaaatcagtggttgcttgggatagggaagtgggagacactgactggaaaggacccaaagggaatctttagggtgaagccaatgttctatatcttgatgtggtgtcagttacaaggaagtatgaatttgttacaattcatcaaattaggtatactttagaagagtatattatatataatatatatttaatatattttaaaaaatatatatatataatttttttttttctgaaacagagtcttgctttatcacccaggctggagtgcggtggcacgatcttggctcactgcaacctccgcctcccaggttcaagcgattttcctgcctcagcctcccgagtagctgggattacaggtgcgccaccacgccaggctaatttttgtatttttagtagagatggggcttcaccatgctggcaggctggtctcgaactcctgaccttgtgatccgcccatcttggcctcccaaagtgctgggattacaggcatgagccaccatgcccagcctagaagagcatattttataaactacaaattatgcctcaataaagttgattcgaaaacagacataaaaattgttgtctcatatcaagcagagtcccatggaataaaaaaattgtcttggccgggcatggtggctcatgcctgtaatcccagcactttgggaggcccaggcaggtggatcacctgaggtcaggagttcaagatcagcctggctaacatggtgaaaccccatctctactaaaaatacaaaattagctgggcatggtggcgcacgcctgtaatcccagctactcgggaggctaaggcaggagaatcgcttgaaaccagcaggcagaggttgcagtgagccagaattgcaccctgcaccccagcctgggtgacagagtaagactccatctccaaaaaaaaaaaaaaaaaagttgtctcagttcatagcagcttgtttctaactattaaaagctggaaacaacccacaacccaaatgttcgagtgaatggataaacaaagtgtcacacatccatacaatgactgcaactcagcaataaaaagaagtcagctattgctatatacagcaacatggatgaatctcaaaataattatgccaaatcaaagaagccagacataaaaagagtgcatactatatgattccgtttatgtaaaactactctatggtgacagcagatcagtggtcgcttgagtaggggttctaggatgcaaagggaggattacaaaggagtgtgggggaactgtggagtaatagatgtgttctaccttgattatggtaatggcttcatggatgtgtatatgtcatgtgaatctaattgtatgcttataaaaatatacagcatattgcatgtcaattatctctctaacgctgtttaagaaacatgagacactacatctttttgttggaacagctaaaattagaaaaaactaacaacactaagtattggtgaggatgtgagcaactggagctctcatagcttattcacggggatgctgtgtaatacagacattttgcaaaagtttggcagttccttataaaattaaatatacacttaccccacaacagcaatcccagtacaagggaaataaaaacaattcacccaaaaatctctatgcaaatgtttatggcagctttgttcaaaattcgaatattggtaaataacccaaatatccttcaactagtagatggaaaacaaattgtggtatatccacagcatactcagcaacaaaagggaatgaactgttgatctactcagcaacatggaggaagctcaaaagcattatgctaaatgaaagaagccacatttgaaaggctacatactctgttattccatttatacaacattctagaaaaagcaaaactatagggacagaaaataggtcagcatttgccaaagtctggggttggtgagaatggattgctacaaaatgccatgagggaattttaggggatgatggaatggttgtatattttgattgtggtggtggtggtgatggttataaaactacgcatttgtcaaaatttgtagaactgtacactaaaagaggtgaattttactatttgactattttttaagtcatctcagaggtaaaaatgatcccttatgacttgcaagggttatgtaccataaaattagttcaaaagatctaatttgataaggtgttagatgagagctttcaaaacaatatcaactttattcttctctgcaatatatagacttgtataaatatgcataactgttaccatgtgttaaaatgaatctaaccttggaaatgttatctgaacaaatgggtcaggtaagatacccagactccaaacacaatccccatgtcttgtgaaaataacttcgaaaatgaaacttgtaattcttgatcaattgttatgttggatgtaactgacatttctatattcttaaaaggtataaatatttgtaggacttcaatgtcaaatcagtgagagatgtggtacttccagctgtcatacacatgtctgaatgattaaacacttatgactgtcagatttttaaacaaatatctgggtgtcttaacctaggccctctagaaagcagagcccaaggcaaggattaaagcactggtattttatttattatttatttttattatactttaagttctagggtacacgtgcacaatgtgcaggtttgttacatatgtaacaacccaaatgtccatcaatgatagactggattaagaaaatgtggcacatatacaccacggaatactatgcagccataaaaattgatgagttcatgtcctttgtagggacatggatgaagctggaaaccatcattctaagcaaactatcacaaggacagaaaaccaaacactgcatgttctcactcataggtgggaattgaacaatgagaacacttggacacacggcggggaacatcattcaccggggcctgtcatgaggtggggggatgggggagggatagcattaggagaaatacctaatgtaaatgacgagttaatgggtgcagcacaccaacacggcacatgtaagcactggtattttatttgggatatgtaagaacagagaggtgagggcgaggaaaaaggtaaatgaagcaaggaacgatgcatagcaatgtgatgtaatgcattacctcaccgcaggcttcacagtgagccaggaggacacacggagtgtttgccaagtgcatttacttagccgaacacatttgccagacaacctgtgtgtcttctctggaaggcatgcaaggcaaaaccatggctgagaggagttcacaggagggagacaggagggggcgcttgcctgccaggctccctcctgtcctctgcatttcactaatcaaggccctccagagggagctgactcctccatacttctggatcattgccttaaacctgtcagcagaagctcaaggggttgatggggttgatggaatctgagacagtgctctagaatctgtgtttcatacaggatgagatataaatgaaacaaatgctaaataatgacacaaggtaccttgccgagagaggaatcatccacctggaagggtaggctgtttgtgaataatgtagggtgggagagaaggctttactaaggagatgggcttaaagaatgtgaacgatgtgctcacagaggccacagaagagaaattatagccaggagaacaacctgaaagacaaaggacacggtggcataagcacatgtaacacaatgtactcaggaaatggctggcatcctgagatatggagtggaatacagtacagggctttgtaaactcagcttggagtcagatcacagaaagccttgacaaggaactgaaaatgggttctgaaggccagaagccattcaagattcccaaagggaaaaacacaaatcagcttgttttcaggacgtaattctggggcagttgctagaattacatcagaaaggaggttcacacaggatactagaagggtcctcccttccatagtagaagtgtttgtggtgaacaaaaattaaaatttcaaagatggtaactgtcagaatggagaaaaataaaacttaaatgtgtgcggcaggaggaaagtaaacaaaaaccaagctgactaaccaccttattacaaggccaccatgacaagactagagcgtccatcatcagcttttagtgcctcaatgttaagtatggacaaatgagcagtaaacatggtcatgaggtatttcaagaacacttctaagagcagagacagaggtataaacaagtagcggacgggaaagaaagaaaaaaaaagttgattcagggaacagaagaaatgtagaaataattgacattagagagataatgaattcattttctaatagcatttttttccagaaaaaaaatgagctagctcttggaaattaaaatcatagagcagaaaaaatatatatagcagaaaatgtagatagccaacagaaaggtagaaaataaagctgagaaaatcatcctaaattttaaaaaaaggcaaaaggttaaaaatggaaaacaagagaaaaaaaaacttagaggtacatttcagaaaatcccacattcaactaataaaactcccccctcccgcaaaaaaaatgtgattaaaattgaaatatcccagaactgaagcacataacttgccagattgaaaaagctcactaagtatttagcattatgaattaaaaagcacccacactggctgggctcggtgactcacacctgtgatttcagcactttaggaggctgaggcggatggatcacttgaggtcaggagtttgagaccagcctggccaatgtggtgaaaccccgtctctaccaaaaatacaaaaattagtcaggcattgtggcatgtgcctgtagtcccagctacttgggaggttgaggcaagagaatcgcttgaacctgggagacggaagttgcagtgagccaagatcatgctactacactccagcctgggcgacagagtgagactgtatcaaaaaaaaaaaaaaaaaaaaaaaaaaaaaaaaaaaaaaaaaaaaaaaaaagcacccactaagtcataacatgaaatttcagaacacctgagataaagatcctaaagctgccagagaggaaaattacaggtcacaaataaaagctctgcagtcaggatagcacaggatttcaacagcagagatgaaatctagaacaacaatgaattaatgcatttaaaactgcttacctacaattccacgatcaaactatcaaaggagtgaaagagtaaaataaacccatttcactcaggcaaaggtcttgaaaagtttatatcccaatgaccttccctgggatgctgaaagatatactccacccaacaggaaagtaaaccaaaaagcagcagctatgggatccaggagacaggagaggaagaaatgaccagggtgaaggtaaagagaaatcccagggcagaagctatgcctgaggtctagagaataaccaacgtgcagtggctcacgcctgtaatcccagcactttgggaggccaaggcgggcagatcacttgaggtcaggatttcgagatcagcctggccaacatggtgaaacccactctctaccaaaaatttaaaaattagctgggtgtggtggtgcatgcctgtaatcctagctactcaggaggctgaggtgggaggatcgcttgaactcaggaggcggaggctgcagtgagccaagatcacaccactgcactcaagcctgggcaacagagtgagaccttgtcttcaaaaaaaaaaaaaaaaaaaaaaaaaaagaataaccaaagtgcctgttctgggctgagttgtgtcactccaaaagtcatgttaaagttctaaccacagtatctcagtatgtgactgtatttggaaatgggcctttaaacaggtaaataagtaaaagtgaagtcactagagtgggccccaatccaatatgaccagcgtcctttttctttttcttttcttttaaattgaggtcccattccaattagcatctttttaaggtaaggaaatttagacacagagagacacaaagggaagaccatgtgaagacacaggaagacggccatttacaagacaagaagagaggcctctgaagaaaccaaccctgctgacaccttgctctttccatctccagaattgtgagaaaattaatttctcttatttaagccacccagtctgtggtactttgctatggcagccctagtaaacgaatatagcactgaacccagaacaagggaaccaggaaagattaagaaaaaaaaaaagaatttgatgtatatacaagattacataatgctatcagagatttgggggatgaattcatcatcaatccataggaaaagaggcaaacaaatgaagtaaaagtgaggggggaaaagtggtctgagaaacacaatcatggtacactatggctcatgatgaatatttagctagtaaataacatgaacttagatcgctgacttaaccaaaggttgagaaacaactgtggtgtggtgtgggtggatattatgaaagagctaaattcttatctaccataggaggaaatcaacaggtaataacactaatggaaaaatcaagaagtggcgatataagcacattatttaaatatggaggcaaatgccaataaataatgcaaaaatacttaaagtggctgcctttgggaaatgatatccaggagtaaggtggaagaccgccccttttcatgataatctcagtggagctatttgaattgtaaacaactcataggtgtttatgaataatgaaagaattttaaaacctaagcagaccactaaagacctttttattaaattgtatatatatatatatatatatatatatatatatatatatatatatatatataattttgagacagagtctcactccgtggcccaggctggagtgtggtggggtgatcttggctcactgcaacatccgcctcccaggttcaagcaattctcctgcctcagcctcccaagtagctgggattataggtgagcgccatcacacccagctaatttttgtatttttagtacagatggggttttgccatgttgggcaggctggtctcgaactcctgagctcaggtgatcttggcctcccaaagtgttgggattacaggcgtaagccactgcatccggcctaaagacatttttaaacaaaagacttgctagtcctcttagccagacacagaacaagtgtgttaaataaataagacatgaaacatctaatggtgacaagattttttaacaggccatgttaactgaaatgaggaggacacagaggggacaatagggtcaggaaacttttttgaaggtgtagtgtttatatgatggcacttctgctgacagcgtcctcctcagaagttgcctgcccaggggctctttaaaacagactaggtggatttccatgtctgcccctgcttgttctttttgcctcgccagttgtcttgctccgatttcttcccaagtgggctttcatgatgtattcatgatgagccttcatgacgtactctacaagactagccttttagcaagaacttttatatctctgttaaatgtgacaagcagagaaaaactgtatagccatcacttagatgaaatatagcaatgtgaccaagcctatgttacaaaaatcatgtaggttttacttattttcctttctctttgtccttaacttcctccaggcaggactgcttgcatgtagtcattttggtagagggtagtcactaataagtgattaacttcatatcctaacccccaggggcggcttgcaagattgatgaacttgtttttcttgtaaagaacaatgatccctgggtcatgctgacctccttgatggcacccagaagtttgattggccaagggatgcaagcagctttgataatcaggggatctcacttcccatatacctaccttactcataaaagccactggttacgtgcaaagggaggctgaatttgagaatttgcctctcccaccctcatgctttggtcaaattgaataaacctttctctgctctgaagcaccgatgtgtcagtgtttggcttactgcgcatcaggtacttgaacctaacttttggggttctgcaacagattttggcaaccatgccaggtctagcatggcaataggccctggccaggttaggcgaacgagtgtcccagcagctgcccaagtgtgttggtcagggggccctaaagtcgctcttctaggtcagtgtaggctgctgttggtactctagaagcttagagcagagaaacatctcagactgctatctggacttctggttttggtttgaagggtaagtcactgcggtgcacacagccatatctcactctctctgcttgcattgtgaagagggcccttttgggggagtaatagaatggtggactatgcccattttcttgtttgctttcctgtagggagtttggttttctgtttgtgattttgttttgttgttgttgttgtttggtttggggggtgtgtgtgtgtgtatctgtgtgtgtgtgtgtgtgtggtgtgtgtgttatgtgaaaagactgaacagggcaaatttggaattgatcccagagagtagcatcattggctgcattctccagaattgggccactttcagctatgagcccatgaagaaaaataaaatttttttaactgtaacgctgcttggcctcaatatgccttagaatttgggaaaaaatggctgacaaacagttctttaagttatgctactataatacaactgcaactattctgtaagagcagagaaaataggatgcaatcctgtatgtccaggcttttatactcttttatcagaatgaacctactcaaaagaggtataatttgatgctgcaaaaggaaaaacagcccaaacctaaggttttagactcccaccattaggtggggaagacagggcactgcttggtgctttgaatcccctgaataatcatcctgatcctctgccccccagtcagctatggctccagcacctccacctccttatgggattgtctggagcaggaggggaacactcccaaacctgtcctccccatggaattaggacaggttgtggtctcgccttcctgcaactgacaggaaacccaatttggcctgggacccactggtcccttagtagggcagtttcctctgtgtcaattccccactgtgggacttgaatggacaacagtttggcatgatgtggttacatttccttttcccactttggagctgttcagtgggaaaacaatatctttggaaaaacaataatcccccctatcccaacccaagcaaatggctgggctattcttgtctatatttctgacctaccacccgacaagggcagatactcactttgttaaagtgctgctcacagcagaagaaaggcatgtagtcacagaaaaggctagggaagaagcaaatcggctccatctggaggcaggaaacaatcacccctggccaatagactcagtccctaacacagagaccaggtgcgatgtaaatggtggggcctttcccacttaggacactatgagaaccacatccttgaaggtttgaggaaaggggttactcaggttaagagcctcaataaggtacaggaagtacagcggcaagcatatgaggaccctttgtaattcccagaaagactccatcagacatgtggaaagtaggttgacgctaactaaccctgaggcaccggacaatcagagaatggtcaatgtgacctttatcagccacagtgccctgatattcaaagaaaactgcaaaaggtaaatgggatccttgggttgccaatctcacatttagtggacttagcttttaaagtgtactatgctcaggatgaggctcaggaaagtgcaaattgaagcaacaagtaactcactggcagctgtgcttgactaccaacctaggggaaaaggaagaaatcaaagagcggctcacgcccccttcagaaaaaaaaccaatatgcctattgtaagaaggagggacactggaaaaagggctgtcccaaattgaccaaagcagctagcaagtgcagtgtccctcaaaatcagatgaggagagagaataatatttagatgaagactgatgtgtcccagggactcccttagacttggagcaaccagtggctatatccccacaggattcctagatacaactgacagtggggaacagaatgattgactttttacttgacacagtgccacatattaattaattaacaattgtctctctccagctttgggaaaaaccattactgttacacggatattgggagacaccattatccctttctacaatcttcaggttaccatttacgagagaccggcctagggcatagtttcttgtacatgcttaatgcccagtgcccctcctgggctgggatttgcttgccaaattgtatgctcaacttgtctttccccccagatgcctagatataatgattccttctgaacaagtttgcaggtttcaaatactcctgctgcaaccagaaaacgaagaggttcaggacattccagaagaaattctcacacaggtaaggagagatgtttgggcccaagggaagccagggagagtggtcacagccaaacccataaaaattaaaagagagacacagaatacccattaaaggaagtggcatgaaagggtattcaaccactcttggaaggcttttttggcacaaggactgatttggtcctgtaattctccctttaacattcctgttctacggtgggcagcaagccacccaggtgctgaggcaagagaccgagggcacaagttgttccagtataataaaatatataaaacaacaagagttatactagatctaaatcatagacatgattatatatgaatatcattaatcattagtttgtagcaattactctttattccaatactgtaataatcctcgctctataatcataacctaggaaaaaccaggccatacagagataggaaccgaagggacatagtgagtgagaagtgatcagaagacaagagtgcaagccttctgttatgcccggacagggccaccagagggctccttggtctagtggtaatgccagcgtctgggaagacgcccattgccaagcagaccgtggtctagcagtagcatcagtgtcaaggaaaaacacccgctacttagcagaccgggaaagggagtctccctttccctgggggagtttagaggagattctactcctccacctcttatggagggcctgacatcagtcaggcccgcccgcagttatccggaggcctgaccctgtctccctgtgatgctgtgcttcagtggtcacgctcctagtctgctttcaagttccatcctgtacacctggctctgccttttagataacagtagcaaaattaatgaaagtactaaaagtctctgatatgcagaaataatggcgtaagctgtctctctctcgctctccctctctctgcctcggctgccaggcagggaagggccccctgtccagtggacacgtgactcacgtgaccttatcaatcactagagatgactcacactctttaccctgccccttttgccttgtatccaataaataacagtgcagccaggcattcggggctactactggtctctgcatcttggtggtagtggtcccccaggcccagctgtcttttatctctttgtcttgtgtctttatttctacaatctctcgtctccacacatggggagaaaaacccactgaccctgtggggctggtccctacatcttaccatcatgcaagtcccattaagacaactacagtttcggctgggcgtggtggctcacgcctgtaatcccagcactttgggaggccgaggcgggcggatcacgaggtcaggagatcaagaccatcctggctaacatggtaaaccccatctctactaaaaatacaaaaaagttagccaggcgtggtggcaggcacctgtagtcccagctactcaggaggctgaggcaggagaatggcttgaacctgggaggcggagcttgcagtgagccgaaatcgtgccactgcactccaggctgggtgacagagcgagattcgtctcaaaaaaaaaaaagacaactacagtttgtacaagacttagggccagtaatgaaacagtctaggacatacaccctatggtaactaacccctatagcttgctgatcactttgtcaggagaactaggttggtttacagatttggactgtaaagatgccttattttgcattagacaaggagacacaagagatctttgaatttgaatctctgaggctgggacacaggtcaatcagcagtactgttatctcaaggatttaaaaattcccccacaatctttgggaaatttttggcatggaacttaacggacatctggctgacagaaggaacgcttttacaatatgtggatgaaatctgtgttgcaagaccttcagagctttccttgaaaataccattcaaatactgaatttcctagtggtaacaggctactgggtttccaaaaagaaagcccagatctgccaaaagatagtaaaatacttagggtttgaactgaataaggggcatagaaaccttcccccaggccacctggaggcaatcgtctgggtagctgtccccatctcctgtaaacaactgcaacggtttctaggaatgatgggattctgttgaatttggattttgaattttggacttacggtaaaactcctttatgaggccctaaaaggaaaaaattctgagcccctgatctggacttcagaatgccaaaattaaaagtcaaagaggctgagcacggtggctcatgcttgtaatcccagcactttgggaggccgaggcagtcagatcacttgaggtcaggagttcgagacctgcctggcctacacggcaaaaccctgtctctactaaaaaatacaaaaattagctgggcatcgtggtgggtgcctgtaatcccagctgctcaggaggttgaggctggagaatccaggaggcaaaggttgcagtgagctgagatcgtgtcactgcactccagcctaagtgacaagaacaaaactccatgtcaaaaaaaataaataagtaaataaaataaagtcaaagaaaagttaaagactgcctctttgctgggccttccagatttaagaaagccctctaatttagttgtgcacaaaaaacaagccatgggcttgggtgtcctaactcaaagcttgggaactgactgaagactgattgcctatttctctgaacagtttgaccaggtggtgagggttggtccccctgcctccgagcagtggctgcaacttgcaacctcttctaggaggctgaaaagctaactctagctcagctcatcactgtccacacactgcatcacatctcctgtctcttagatcaaaaaggtggatactggctgacctctgagaggttgggaaaataccaagccatccaccctccttgacaatccagaggtgaagttaaaggtgttctcggttcttaactctgctaccttaatacctccagagaaggagccagggcccatacaaaattgccttccaattaatgagcaggtctttccaaggcaaccagacctggcagatcagcccctgctgtgctccaaactaggactgttcacagatgcaagcagcttcatggaccatggacatcatcatgctgaatttgaggtcattaccttacaaggaattaaggaagccaaagccttattgctaggcacctcagctcagtgggccaaggtgcccttatgcatgccctccaattgggtaagaaaaaaaattatgaatatttacatagactcccaatatgatttcttggtggcacatgcccacagagctatgtagagagaggtcttttgactagcaaaaataaagaaatcaaatatacttctgatattttggccttattagaatctgtaaaaggccaggcatggtggctcatgcctataatcccagcactttgggaggctgaggcgggtgaatcacctaaggtcaggagttcaagaccagcctggccaacatggtgaaacctcgtctctactaaaaaatataaaaattagccaggcacggtgacacatgcctgtagtcccagctacttgggaggctgaggcaggagaatcacttgaacccgggaggcagaagttgcagtgagccgagattgtgccactgcaccctagcctgagcaacagagtgagactctatctaaaaaaaaaaaaaaaaaaaaaaaaaaaaaaaaaaaaatcagtaaatgccccctctaatagtggctatcatccactgtcccagccatcaaaaaggagactcccgaatagtcaaaggaaattagcttgccgacctggcagccaagcaagccacaaaaacattggactctgaggctttcttagccccactaatacctcacaatgatctgaccaagttccaaccttgctataccaaaggagatttaaagtgagccaaggaatggggattcacatcccagccctggcccatccaggctggaaatgtaatctggaaggtatcgtattggttcccagtgccctccttaaagatatagtgagctagtttcatcaaagcatccattacagaaaagatgcaacccttcaatggcatgtgagttcttgattgaccccgacatgcaatggggtcattcaaaatgtgatctatcaatgcatgctttgtgcccaaactgccctaaaactgaccccacccctgttcaagggtacaacattgaggagactctccatgcaaggactggcaagttaatttcaccacaatgccacgggtgcctggaggctacagggcatctttttgtacaaaaaacatctttttgttttttgtagacacatttacaggatgggtagaggcataccctatccgaacagaaagggagctgaagtggcccacactatactaaagagataattccccagtatgaactccctttgacgattcagagtgaccatggtgcggtgttcatctctcaggtagtacaggaagtgtctcaagtcctagacattgaatggaaacttcatgcagcacagccacagcccaccggaaagactaaaaaactgaatcaaactatttaaagaacaattaggccaggtgtggtggcttatacctgtaatcccagcactttgggaggccaaggcaggtggattatttgagcccaggagtttgagaccagcctggccaacatggcaaaccccatctctactaaaaatacaaaaaaattagctggacgtggaggcgcatgcccttagtcccagctgcttgggaggctgaggcacacgaattgcttgaagccgggaggtagagattgcagtgagccgtgatcatgccactccactccagcctgggcgacagagtgagactgtctcaaaaacaaaaaaaacaaaaaaacaaaaaaaaaaaactgctgctaaagtgtgccaggaaactaatctaacttgggacaaagtactaccttctctcctgctgaggatttgggtcattccctgaaacaggctctagttgagccctttagaaattatgtatgagagacccttcctagccacattggggctagatcaggctataaaatcttagaaagggaaggagctattagacattatttaaaattgctaaatgaaataccgacttctgttcatgagtttgcttcttccccatggacaggccacctcaccctttctaggctagagaccaagttctacttaaaacctggagggagactggactgaatcaccaactagcccctcaaagggtaagaccctatgaggtccttctgaccacgcattcatcaattgggcaggagttaaaccgtgggtacattatacctggataaaaattgcccccgcctcagcccgacctatcaggttaatagacctgaaaggacatgtgaaccaactaaaaacctgaagctgcttttgaagaaaacatccacagataagtaaagccttcttgctaagcaccacagtactatatggcttacggtgtctgctgaaaccaatcttttcctacaatgggcacattatgcagatagcctacagaagctcgtagggtttgagggctgttacctatctctagcatgttggtattaccttggtcggtcttgctcttacaaggaaacaactgagtacagtaacaaacttttatgaaaaactattccaaagaaaatcaggtctctggtgtgctaacacgaggaaatgtaaggctatggcctggcattaatataacccttcacaacccaggtcacagaaaatcttttactatatatcagactgttcaacgaacttttgaatacactgctcctcctctcctgaaggaatttcccttggcagccccccaaattttggctattaatagccactatactgaggaaggtttttatcaagcttgggatgattatctttgaatgactgtgttcccctacccttatcctgccaccggccacataaatcaaattgcccctttatgttgggaacaacaacaaaaaaaaaaacagcattcttatgataactggccaaatatcactaagaatatgggctggatgctccccccaccagtgtgaacatactccagggctgcaacaaactgactggtttgctaccaattggacacaggccaggaattcaattggctagcttcatacggagtgcaatggctatgtgggactaatctttggccctgattacccattggctagataggacaatatgctctgggattctcacaggtccagggccatttggcaaaaaccaacggacaacctggaaatttcccaaatgtgttgcatcaacggaccaagtcagttttccactggtatgaccatcccctctccatttttgttccccaagttagtttaaaaaatgttatctgacatgttgagatcctaacaaattatacccagcatgtgctgaaggatgcattcaaaggcatctctttagtcacctctcagatgactatgatgaaaaaagcagttttgtagaaccacatggcccttgatgtcttcacagctacacaaggagaacttgtgccataatgaaaactgaatgctatgtgtacattccagacaattcaggaaacatcaccctggcccttcaagatatgtacaaactgatgctgtgtccaacctcatgatgtcactaaaccaatgattatcttaatacttccggtcagtaccctcttggtggaaaaaattactggtaattctagctatgactataggaacaggaatactccttggctgtggattatactgctgtggcactatatatgtgggattgcaagatcgcccttctcaagctcctgacaccctgttcaacaatgttacaacaaaattgcctaagtcccgggacatgtgaatattttcaactgcaggtaagtaagttccattcctcagccccctaggaatgccccttgccagcgggaagtagttagactgagtcaacaccccaactgaagattgaggaaaggaacagtgtcagtggggatactgtaacccagcctatattagaaaaatcatcaggtgtttattttacttatttttctttctctgtccttagcttcctccaggcaggatcgctcgcacgtagtcattttggtagagagcagtcactaacaagtgattaactttatatcctaacccccaggggctgcttgcaagattaacgtacttgtttttcttttaaagaacaatgatccttaggtcatactgacctccctgatggcatccagaaatttgactggccaagggacacgagcagctttgatcatcagggaaagcccccaattacatgcaaaggaaggtcatatttgagaatctgcttctcccaccctcatactttggccaaattgaataaacctttctaagcattaatgtgtcagtgtttggcttactgtgcaccgggtacatgaacctaacttttggggttctacaacagcaacctgactgagctaatcacgtacagccaagaacagctgagctacagtagctccttaaaatcagggtccagatgttgttcatagatgagagaagagaaaataactatcacatgcagcatcagacattcaatgacacaaatcctcaaaatcagatgctttaaaaaatgaagccaatggctgggcatggtggctcatgcctgtaatcccagcactttgggaggccaaggcaggaggatcgcttgagctcaggagttcaagaccaacctgggcaacaaagtgagaccttatctctatcaaaaatttaaaaataaattaattaaaataatttaaaaatgaagccaggttgctcaagtattcatcaagtatttactgaggcttactatgtgttatgatgatgagacacttctttgagccatcaaaggtttctggcttcctctgcaactaaaaataattaccctccccaatgaagggtctgtgtgttccacaggtatagcagcagaagagacaacttggaaaaagtgaaggtaggccaggcacagtggctcatggctataatcctaacactttgggaggctgaggtgagtggattcgcttgagctaaggagtttgagaccagcctgggcaacatggcaaaacctggtctctattaaaaaaaatacaaaaaattggccaggcattgtagtccacacctgtagtctcagctactagggaggctgaggtgggaggatcacttcagccaggaggcagaggctgcagtgagcctagatggcaccactgcactccagcctgggtgacagagcaagaccctgtctcaaaaaaaaaaaaaaaaaaaaaggtaagccacaactccacttaagaggagaggcaactggagaaagatcccaggaggttatattcaacaacggagcaataacacagtagtcttgctagacatccacagcctttaaatggacatattctactctgtttatcacctttataaaagttttcaagttttctggatagttctactcagttgatggcaattaccctgccaggtaacttactcactataattgaataaaccagcaatctggtttatcagtcagtctctcttgctcaattgacaatccctaaaagttcatccattcctgtgtgagaccgtatatctgacaattcagtcaaaggaagttggtcaaatcccacaactgactgccaaagaaagtaatatctaatcacaaaaataccacaattaattacaggtagtaactaggttctaaagaaattatctcctaagtagattttaatataaattttgaacagttatagaaaataaagatggcctttgggtcaataacagaacataacaaaaacactaaaaatttctgtacataaacacacgcatatcacaagtctagtcagaaagaaatacatagaaaaacaagatagaattttaaaaataatttgcaagggaagttctcaatgcttcagttctaaaatattgtcttcttttagaaaaatttaagactggaataacagattgtttttcctgcaatgctgtaattactgcaaatttatcagcaaagaggtaaacagcaatgcaatttttccttaagcttgaatacataagggaacaataaagaaacctgattagacctgaactaattaaaagtcacaccagtaattttcaggccagctctggtctccaggtagaattccaggacaggtttgtatcactgggtccattcccaacaggctggataggagagtctggagtaattataaggataccaccttcttctatcctgggctgcccgactggcattgggcttcacattccaagaatacctcctgtgtgaatagtcctctccagggggaccaggaggagggagatggtgtctctggtaaacatgtggattctctgaaaattttcttaaagcaaaacaaaaagtaataagccattactaggattaatacaataatttttatttattttaaatttatattttcataaaatattttaaatttataaatttacaaaataatatatattctactgtttcctacctgtgtgacctaagcagataaaatacttaattgttatttccctaagttctttataaaatggggctaataatacttttcaccttcacgagctgttatgaagctaaattaaaaaaatacatttcaattacctacaatgccctggcacaccgtggattcccagaagcctttccacctttccctacagagataaatgcatgcccatactattctaatcaaatactttctctcccaaagtctggcagggttgacataagacagaataagctagttagtactgagaacagatatctgcttccactttataaacgaacatacataaattaattatgaagtgtgaaaaactttaagcatggtatatgcaacaaatttgaaaaattaggatttaaattaacttgtttcaaaagcaagaccagaaaatctcatataattatacaaaagaaaatttggggctgggcgtggtggctcgcacttgtaatcccagcactttgggaggccaaggcgggcggatcacctgaagtcgggagttcaagaccagcctgactaacatggagaaaccccatctctattaaaaatacaaagttagccaggtgtggtggtgggagcctgtaatcccagctactggggaggctgaggcaggagaatcatttgaaaccgggaggtggaggttgcggtgagctgagatcacaccattacactccagcccgggcaacaagagcaaaactccatcttacaaaaaaaaataaagaaactttggaaatatgagaaaagaaaaaccccccactgcagagccctcaatcccacttactataattcaattagttagtatttccttttgttcttttccccagcatctttttctgactgttgaatcacagcctattagtttcacttatcataaatgagctaacacttccaatggctttataaaatgttatagtatggatataattatttagctacattctccactgttagaaatatagcagctacaagtttttccacaaccacaaataatgctgggattaacactgcaaaacatatactactgtatcctgagctagcccagcatctgacacatggaagggagtttgagaaatgtgctgaatgattaagtaaatatagctttttctgtactttgaagtatttccttaagtctcagaatgaaattactaggtaaagtatttttatggctcttgaaattgtgcttcaaaaggcttataccaattttcaatgccgcaagtgacatgttttttgaaatgtttgtttacatcttttaaaaatgtcaatttttttaaagtttcttttttctttttttaataaaaacaggattccagcatgttgcccagggtggtctcaaattcctgggcccaagcagtcctcccaccttggcctccctaagtgctgggattacaggtgtgagccaatgcacctggcctaaaaatggcaatgtatttttgaaagtgtttacaacgtgctaaactgtttaaattcatgttaactgtcaataacaaccactatggggtatgtattattaaaatatctatctgactaatgggaaaaatgaaatgtagataggctaagtatcttatccaagatcacaaagcaggtgagtaacaaagccaacatgcaaatccaggtccagcctgacaaccactacaatggagtgcttatcaaaaactgttgctaaactggctgggcgaggtggttcatgcctgtaatcccagcactttgggaggccgaggcaggcagatcacctgaggtcaggagttcaagaccagcctggccaacatggtgaaacccccatctctactaaaatacaaaagttagctgggcgtggtggcagtgcctgtaatcccagctactcgggaggctgaagcaggagaactgcttgaacctgggaggtggaggttgcagtgagccaagactgcaccactgcactccagtctgggcgacagggtgagactctgtcaccaaaaaaaaagcaaacaaaactgttgctaaattaataggcaagaataatagcttgctatttgtgatagttaattttaggtgtcaagttgactgggttaagagatatctagatagctggtaaagtattatttctgggagtgtctgtgagggtgtgtccaaaggatactggtgtgtgagtgggtggactgagtgggaggatccaccctcagtttgcgtaggtaccatccaataggctgggggcctggatacaacaaaaaggcagaggaaaggcaaattgtgttctctcctggagctggaataccttaccttcttctcctactcttggacattagaactccaggcttcatggcctctggacttgaggactcataccagtgtcctccaacccttaccagattcccaggccttcagccttggattgagagttactccactggcttccgtggttctgaggctttctgagttggactgaatgctaccagcttccctggttctccagtttgcagacagcctactatgaaacttctcagctttcacaagtgcataagctgataccccgaataaaaaagctcctcctcccatccacccacccatccacccatccatctatccatccatccatccatccatccatccatccatcctactggttctatcattctggagaactcatactaatgtaccactttaaccatactgaggtcttccccattttccaagtgaaaatacttttgtcgttttatctgttcagatcctttgctatttctctattaggattttattatttttcttataattcatatcaactccttaaataacaatcttccttattctaaaaactatactacattaatgtagcctaagaatataagatcctttttgatagccacatcaaactcttggcttaagtttaaaatcaatcaaaatttctaagtccctttccgaattgcctctgaaaagtcacatattccctgtcctgtaactgattttccagtgctaaatgcaaaatacagagcagaataatatctcctggttcaaactgaacagcaagaattccttatcggccaggcgcggtggctcacgcctataatcccagcactttgggaggctgaggcgggtagatcacagggtcaggagatcaagaccatcctgtctaacatggtgaaaccccatctctactaaaaatacaaaaaattagctgggcatggtggcgggtgcctgtagtcccagctactcaggaggctgaggcaggagaattgcttgaacctgggaggtggaggttgcagtgagccgagatcgcgccattgtactccagcctggatgacagagcgagactctgtctccaaaaaaaaaaaaaacgaagaattcctcatcagtatcataatgtgttttcattaactatagtattaatttctatctcaattctagaaaagggaaaacagagagaggtacctgactgattgttgcaaactttgggtctgggtgtggaaatgtcgaggagctgagtgaccctggatctgatgtagattatacctaggtccttgtttaacaggcttattgtggactggttgcatgagatgtgctgagtcttcaaaatcacttgacctgggtacactggaattccaattccttaaagagaatattttccacacaatattactggtttccaaatttagtagtcaatttagtgactatattttggcatatgaaaataacaatttcttccttctcccattcctatttgtttacatctccccccaacaaacaaacaagctaccagaagaatgaacatatgcaacttaaattacataaacagagatctccctgacccacaaatctcacatatataacataagacttactttctgataggaccattctgaaggtcttcaatgtagttttgtctttctaagcaatgtccccggcacctattgaatactgaggagaggataaactgttagaaataactgtacaaaaagcagatctttccagaaaaagcaaattaagctgaaattcactattcaagctgttatatctcactacttccacatacatctatagacttttggcaagactatcttatattggaacaaacgaattacaaacttctttttttccaaaatttgataaattcttctacatttccacctttaactttaataaaagggaaaaatagtgtcaaccctcatacttacattcaattgcatcatctggcctcacgccttctacatcaatcaaatatctaacaaaacaacataatttgggtcatttatatacgaaaagaaaaaaatcaagttttttcaaaaaaggtccaatttcaacttatagacatagatataaaaatcctaagaaaatatcagcacatcaaatccagcagttattaaagaatgacataccatgaccacaaaaagacgtttttcaagaatgcaaggatgacccaactccagaaaatctatttatatatttatttacattaatgtaatttaataaacaaaaggaaagaaaatgcagaatcattttttatcaaaatgctttatacactaaaaatagagacttccttaatatgacagagtatttatcagaaaccaacaatgaacaaaagacaaattgggaaaaatattaacattatatctaaaaaatactgtataaccaacagaatgggccagaaacttgggagtcaccatcactgtcagccatttcttccaaactctcatattcaattcaccaccaactcctgacaacaatattacctaaatatctctatagagtatatctgtatctttctaccaaaatgaccaccatgccctggtccaatccaccattatgcctcagttcctacaaacacctcccaacttgtctccttgcttctacctctttccctctgcagtgtattctccactcagcagcaaaatgataggttgaaaatacaaatttgaatgtgttccccacactcatccccaacaaaaaaaattcaatggttttctattgctcttaaggtagtgactaaaaccttaaacatagctctgcatggtttcagctcctattcatatttccagctccattttaacgccatactacccccatggcccagtctccctagccagttcctccaacacagtatatattttcctgttaatatggtctctgctgatccttacgttcagaattctctccacaacatccctacctggttaacacctacttatacttcagatatttgctcagacctccccacagaaacctctagtcctcttgttgaagtcaaatcctccctattctatgctctcattgtaccatgtcactccccttctcagcacttgttggaattgtaattgtataggcatttgtgtgattctttaatatctactccctccctagactgttaggacgcacaaagggcagctaaagtctctttgctaacacgcagcacactgcttacacataatagatgctcaggagatattttctgaatgaacaaacataactcagtacagtgtggcaacatccataaaaagcataacgacacatactatttgattaagaaattctattttgagtgaaattacctccggggctatgagatatgcattcaaaaatatttacatagaaatgttcactacttcaatgttttataatatcaaaaacttctgacttttgtgttcatcggtgtgcaaagaacaacgcaggccttaaaaagaataaggagtctggccaggcgcggtggctcactcctgtaataccagcactttgggaggccgaggcgggtggatcacaaggtcaggagatcaagaccatcctggctaacacggtgaaaccacatctctactaaaaatacaaaaaattagccgggcgtggtggcgggcacctgtagtcccagctacttgggaggctgaggcaggagaacggcgtgaacctgggaagcagaacttggagtgagtcgagatggtgccactgcactccagcctgggtgacagagcaagactccgtctcaataaaaaaaaaaaaaaaaagaataaggagtccaagtattttcaaagaaagatgtctatcacatattaaattaaaaaacagaatgtctaactattataccattcaataacatgtatgcttgtatctgcatttttagagtctgaaaagatgtgtactaaattattaatggtggtaatctctgggtggggagcaagactgccttctacttcatgtatttctataccagttccattttttacaaccttacattaccattgtaaacagacaaaaacaatttaaaatggtctgcctctggggttggcaacttacctgcaaatgaggtagccagtcctgtttaaaccatgggtacagtggacaccaataagtttatctataaaaagaaaatacagggttaagtaactgaagtagatacacaagtatataacattatcactgccctgaaaatgaataactcttaagaggaattgttttttctaggaacatactataaagaatcatctaacagaaagccaaaactcactgcttctgggaaactttgcatagtcccaattagactcagtgatgtaaactgcaagcctggtcagacactaacagctaaaactgcaatgagacaaacccgtctatcttaaaacagaatgcccatcagcaactgatttaattatacaaaaagggagtgaaagcaacaacaggctaagagaagaatgaaatttgtttctgaatcaaacaaataaaaggccttcactcttgatactgaatattaaggacagtttccatagtactcttgagttcccgaagagcttctattccttctcttgttcggtgctccacacataccacaggtctacctgccctgtgaagtactcaggtaaatagcactattcacattttacaatgaaaaggcaaggcttggagatgtaagtcaaagcaggcaaatagtacaagactagaatcaagtctaagatttttcccattacaccacagtatttcttagtccatctttttaaaaaattacatgaggaattaaataaaaaaaagtgtagtttatctttgcaaaatctgtgtccatgactaggtagtgtctggtaaagaaggcactcatcagccaggtgtggtggctcacgcctgtaatcccagcactttccaacctggccaacatggcgaaaccacgtctctactaaaagtacaaaaaattagctgggtattgtggcgggagcctataatcccagctactcaaaaaaaaaaaaaagaaagaaagaaaagaaaaaaagaaggcactctgccgggcatggtggctcacgcctgtaatcccagccctttgggaggcggaggtgggtggatcatctgaggtcaggagttcgagaccagcctggccaatatggtgaaaccccatctctactaaaaatacaaaaactagccaggtgtggtggtgggtgcctgtaatcccagctactcgggaggctgaggcagcagaattgcttgaacccaggagacggaggttgcagtgtgccaaaatggtgccactgcgctccagctttggcgacagagtgagactccatctcaaaaaaaaaaaaaagaaagaaaaaagaaggcactcatcatcgccagcctggattactacaacaaactaatctccctacttctatctcaactgatcctccatatggcagatgttatctttctaaaacataagcctggctgggttgtttttgcttaaaaatctcaatttagcatagcatgaagcccaaatttagcatggcatttagaatccttcataaactggtatcaatctgtctttccaaccgatctaagtccacaatgatcctaactatgatttacaagggctgatatgatccacctcccttctgcccagccccaacctctctgatcccgtttctcctgctcttaccctcactcactccactccagccacactcggctctgtaacattcctcaaacatgcctagcatagtcatgcctcagggactttgcacctgctgttccctctgccttaggacattcctccccagacacccaatggcttggttcattacttcctttaaggttctgctcaaatgacatcttcataaagaggccttcctgatcactcacctcttccctcatccctttatcatgttttgttattctccaaagcacttatcaccatatatattccatgtatttatttgcttatttctctccccgactagaatgtaaagtatataagggcaaggactttgttctatttccactttctagaaaagtgacttcaacataggttatataattatttgttgcaaatgaacatatgaattccatgccttttcacattatcttctagtcacacaagaggctgcctctccatggctttaggccctgtgccttttgtgcctaatccccaaaactgggctgcccttttctcatactggcaaaattctcatccctgcagctcgaatgttgtctcctgtcaggccttcctcaatctctcctctatattctcactgcacttaatttattcttttattatgatgaactgtcttttttgttctttttttttttgagatggagtctcgctctgtcgcccaggctggagtgcagtggcgcaatctcggctcactgcaagttccgcctcccaggttcacgccattcccctgcctcagcctcccgagtagctgggactacaggcgcccgccaccatgcctgggttatttttttttttttttgtatttttagtagagatggggtttcaccatgttagtcaggatggtctcgatctcctgacctcatgatctgcccacctcggcctcctaaagtgccgggattacaggcatgagccatcgcgcccggcttttttgttctataattaacccacatctttttttttttgagacagggtcttgctctgtcccccaggctggagtgcagtggcgccatctccgctcactgaaagctccgcctcccgggttcacgccattctcctgcctcagccccccgagtagcttggactacagatgcctgccaccacgcctggctaattttttgtatttttagtagagatggggtttcaccgtgttagccaggatggtctcgatctcctgacctcgtgatccgcccacctcggcctcccaaagtgctgggattacaggcatgagccaccgcgcccagcctaacccacatcttaaaccacatgcactacatatttattttcctagataactgtgaactgctataacaaaaaacaaagactgctatcatctctgtgtcttcatgctctaacaacaaatctaaaaggatctcagtgtttactgaatcaatttattttctcagtccctactagttctagaagcgagtggagagtgtagtgtcctctttttatcagtgagcctgttatctgtgggaagggattatagcagaggtagccaaaactgattataaacaaggtcccaagcctgctatggcagtgagtactgcaagacttagacagtcagcaccactcaggcagaagaccaacatggagttcagtctatccaactgactacaatcagtataacgtgaacaactaagatttaaaaatgtgttctcatgtattcataaggacctcctagccctcacagaacagatgaagtgctatataaaaatttcacagaaaagagcctggaagcagtgaataggccatcagctgtaccctcatatcttaaaaggtagtatttctgtgacaacagcttatacaaatgggaaagccaaacctctcaagttttaaagttaaagtacaggggaagatctgtgaacaaggtttaacataattaaaagctagtgtccacattaagtgagcgactaggttacaatttgaaattttatcttcaaacccactgatccagtctctatctctcaccttccattccctatcttcccacctctgtctctattctttctccactactccatcacattttttaaaaaggagtatttactgtcagatttatgtaacaaagtgtacactcctcaagctaaatttggaaagaaggcaaatgaagcctctgtcctgtgggtgtcagtggctttccaaagataaaagcttcttcagtcttaaaatatgacaaatatcatgttctttctggcagagagatgccagaaaaaggcaactggatccttaagataaagaagctgttaagttctattttcaaaagagtaaggtaaatcttaaagcaggaacaagaaagcaccagcctttggcttaagttctcccatgtgaagaataagaggtggtggtatccttccccatctgtactcaaagcggaaaaacagcagaaatatcttttttttaattatactttaagttttagggtacatgtgcacaacgtgcaggtttgttacatatgtatacatgtgtcttaaatacatatgacaaaggggcaattccactggtgcactctttcttgttttgcttctaggggtccgtcccattcttaatctttgccctttcttgtctctttcacataactctaagactcagagttttttaatcttttcttctacttctcacttcttaaccaatatagaagacaaaaataacattttaattttatatatttctcattcaaattaaaaaagaaagatgagccagttcagttcatattttgcactaaaactaatttaacattccaaagttaaattatttgtgatcaacaaaaggaaaaacatcttaccctattagcaccatctgacattttcatcaccttagcatcattaaatacaacaggtctgaggttggaactataaaaaaataccaaaaatccccaaccccattcataatgcacaccacagttcaggtaagaacaaaaactcaccattatctttattttctttcaaaaacccattaacagcgtgtttgaatttaaaaatagtctcatcatcaggcacttgatgtccaactgtaaaaatttttaagtaaggaacagtttctggcaaatcctataaagcaaaaccataaaagatgtgtattatttcacttgtagagaaataattaaagagtaattaggggacccagaatataagccaagagattataacaaacttaatatgccaatatcagtatacacaattctgataaaagagccattttttccaacactgcttcaaccaggaagtatcacttgattttcaataaaactacataatagatagtcactaggtatacaaaactgaaagcaaattccatgtgaatgaatgcatatttaactataaattatataaacagttccatttaatattttataattcaagggccagtgccttcataaagcagctatgatttaagtagaagagtagagaatagagtcagaagaacttggatttgaattgtgagatagagggaattccaggcactattgagaaccgatattcttggggtgggagaaaagtagatacagataaaagacagaagaggctaagtcaaaatcattttaaccatccacaagtgtatagttcagtggcattacattcacagtattgtgtaaccatcaccactgtctatacccaaaactttttcatcatccccgacaaaaagactctgaccactaaaccataattcccttttctccccacctcatagatcctttagtctgctttctgtctctgtgaatttgtctattctaggtacttcatacaagtggaatcatatatttgtccttctgtgtctggtttatttcactaagcatgtttttaaggttcatccatattgtagcacgtattaaatctattcttttttatggctgaataatattccatttaagacagcaattaaaaacatgtaattagagaaatcacttggttctcttttaaacttactacccatcaaagaaggccaagcttcacattagcacaagatgattactgaattactataaattattttaggatcagaaggaagaaagttcttttcattgaagggttccacttacctctggtttataatagcgttgagtatatgttaaatcaataatcagtccaagttcttcattttgttctcggattttgttaaaaagatccaaaggggaaaagcattcttctggagcaagtttcttttcaaaactctgtcacagagaatgaaataagagcaaatatgtgcttaaaatcctgtactacattaggcatttattcaagtcctgtgatgctaacatacaacgagattcaaaggaaagtttccattctcctggaacatagaaggtatattacaacaatcctttcttccagagtggtcagaaagaaaaaaataagcccacttctatatatgtatttctgtatttgtttcatgttggtctcctaatcagactgtaatctcccagattttattcaccactgtatctccagctccaggtggagtgcttatcatatttagtgcttataaatatttcttttctttttttttttttttttttgaaacagggtgttgctctgtcatccgtcatccaggctggagtgcagtgacacaaacatggctcactgcagcctccacctcctgggctcaagcaatactcccacctcaacctcacaagtagctgggactacaggcatgaaccaccacacctggccttttttttttttttttaaagagatagggtcagctgggcgcagtggttcacacctgtaatcccagcactttgggaggccaaggcgggaggatcacaaggtcaggagatcgagaccatcctggctaacactgtgaaaccccgtctctactaaaaatacaaaaaattagccaggggtggtggcaggcgcctgtagtcccagctaccgggaggctgaggcaggagaatggcgtgaacccgggaggcagagcttgcagtgagccgagatcacaccactgcactccagcctgggtgacagagtgactccatctcaaaaaaaaaatttaaaaaaaaaaaaaaaaaaaaaaaagagatagggtcttgccgtcttgccatgtagcccaggctgatctcaaactcctgagctcaagcaaccctcctgtctcggcctcacaaataaatatttctcacatgtctacatatatgaaggatggctttcattgctgaatattcttttatgtatgtggcttatttttgaactttatgctctgttccttcaatctgtctggctactcaggtgccagcaatgtactttttaaaaaatagactagtttggctgggtgcggtggctcaagcctgtaatcccagcactttgggaggccgaggcaggaggatcacgaggtcaggagatcgagaccatcctggctaacacggtgaaaccccatctctactaaaaacacaaaaaaattagccaggcgtggtggcaggcgccggtagttccagctactcaggaggcagaggcaggagaatggcgtgaacccaggaggcagagcttgcagtgaaccaagatcacaccactgcactccagcctgggcgacaagcgagacaccatctcaaaaaaaaaaaaaaaaaaatagactagttttcagagcagttttaggttcacagcaaaactgagccaaaaggacagatagttcccacatgtactttgccttccccaacccacccagactcccccactatccacattccataccagtgtggtccatttgttacaaatgaagaaccaactctgacacatcgttatcaccaaagtctagaggttaggtatgcgtgattcattctatgttatgcattgtatgtacatattatgttatatatattttgccacaaaaaaaatgagagaaagaactaagttcaagttttgattcttccttttctgagcctgtttgattatctacaaaattatttattagatgtaaccatctattctctgagcttagtgcagaataagcactcagtaagagatattagtactactgctacttcatcagcacaggattgttgtgaaatgtgttaatatacgtgaagcccttttataggttttgatcaatatataacatgtatccacccttagagtatcacacagaatagtttcacttccctaaaaattccctgtgtctccaacaccttctttttggagacagggtcttgctctgttgcccaggctggagtacagtggcatgatcatggctcactgcagccttgacctcctgggttcaatcgatcctcccacttcagcctcctgagcagctgagactacaagcacacgccaccgcgcctggttaatttttgtattttttgtagagacacggtttcagtgttgcccaggctggtctaaaactcctggactcaagcgatacacccaccttgcctcccaaagtactggattacaaacatgatccaacaggcctggcctgaaatgactcatttttaagcccagacatgcagagaagctgacacagcagttgaaaaaggaaatctgatctataagtcacaaattaagtaaattcccaaaacgtttcaagtaggcttctcctgatactaatctgagctatgctggggaagtctaataagaaagacatggaatctagaaaacaattatttgtcttcaccttctcatcttttttatggctgtcaaaagctttcccctcctatccctcctattcctttcctagtttaaacaaaaatacaatcttcagattttccccactgaaatcctgaccttgatgatccgggggatatttctgattgtgaccatggaaggaaaggagtcccactggcattcagtgggtaagggttacaaattctaaacaacttgccaaattcaggacagtcctacaaatgtgtcccacatcctgaatggcttttggatgtcctattcaagattaatatagataaaaagctgttcatatttagcttggcctcagaacctaactccatttcacaaataaacacaaagtattttttgtacaatactaatatatattgaattttccaggataataatcaccttatcaaccaaatgaagattatactttgttatatttggaaatctattacagaaactcctaccactaaagcaatacaacccacctagatcagtctacatttgtaattcttgaattcatggcgcaggcaactattactctatgtcttttaatgtagtcatgtccaaacatttatatattgaaataaatattattttattataaattacttttattttattttttatattatagttagggtgttaattggtatttttgtttaaaatatgaagtaggttgtatgtacctatgaacttcatttcaggatagtaaaggggtcattacaaagtatttgctataaaaagagaaaatggaatgtgatagagtggagagcagtgttctgcatggtgaactcagatgcctgaaagaatactgaattaacttttgcttaccttttgcaaaggaactttgaaagcaatgaaacgagtcccaggcatccgctgtccaactgggagatagtctttccacctattagatatattttttgttagccaaattgtatgttagccttgtttccttgcacaaaataagactttttgaaaatgggaatcatagcccgcacaacatgtcctctctcctctctgctttgcatttcgccactccacttattaaaccccaccaagtaacgacctataccgtccttctctcctgtttccccatcataaaaacgaacacaagccaacacaacagtacaactcaaataaggcctatataaaaccggagatacccagaacttctgtatccctgttaaacttggcccagtaccagatactaaagtgccattaatacaaacatattcactgaaataatttaaattcaattatttcacttcacgcttttagttttcatacgactgatgccataaagttcaattagtaggaaacttcaagttcatattttaagagaaaacctgctagaagagggactgtgaacttcacttaataatgctaggaactggccgggcgcggtggctcacgtctgttaatcccggcaatttgggaggctgaggcaggtggatcacctgaggtcaggagttcgagaccagcctgacccacatggtgaaaccccatctctactaaaaatacaaaaaaaattagccgggtgtggtggcgggcgcctgtaatcccagcaacttgggcggctgagggaggagaatcgcttgaatccgggaggcggaggttgcagtgagccgagattggaccattgcactccagcctggcggagaagagcaaaaatccatcccaaaaacaaaaacaaaaaaacggattggaagaaaacaaacaggagattcactaattagaaccccactgcaataagtcaggcaagacctgtattagggtactgacagaaagtgacagtcaaaagatagtagataaaatgaagaggatttattgaggtatgagatggtggaggatggtctcaaggagtaaaaacagttcaatgcacctacgtgcaaagtctcaaaattaatcatttgtacgtataaaggagttatctttcaaatgaggcctgttaggaagtaacaaagtatgctctttgtgatttctggaaacaatacaaaccaactttccatgtgagatctcagggcgctactactgctgggttcctaactcaaaccattacactttccgtgccaacgtaacaaggaattgaggaggttccattttgggaattaaggagtgtccccaacagtaacagtcccaccttaaagcaatccttccgtattttacctaagagcaatggccagaacctcccttttacaagaatatggagaaatcacaggacatcacagacatcgcccctttcagctacagcgggtggcgcagagggtcaaagcctcaaagcaagcggcggacaagtcaagcttgcgatggcaacggcgagaggcagagaccacaaacgatgaagcccagacccagaagccacgagctggaaaggccacgccaagggaccaagacatactacctttcggggatgtggtttccgcccttcttcttggctgaggagcgtcctgaaaagtcgcgtctccggccccagccactgcggggatgatgccactggctcatgtgggtcccaagaagccgcccacccaatgccaagtcggccaaaagcgccagtccggcgccctcaatgccaggataagaccctaaacaggaaaagactcggcagccacctacgccgcgctccagcgtctcgctattgcgcatgtgccaccgccggtcgtgatggcgtagccacgctggcttactgagactcctgatctgtaaacaggactttggtggctacagcgccctctttagccagaggccagtagcacaggtcaataagggcgtgtatgcacccttcagaattcaaacagtgaggcacagggaagtccctctgcccgatccgccccacgccccggttccttgtgtgttcttctagatatttaccagcgcttacattcacattttgcatattttgtatacatatttactttcacatatatgtatatcctctatttttatacaaaaggagtaactgtacatattctacagtataccttaaacactgattatcccagtcaatttatgcatacatagattctatttttaatggctataggcaatttacttgcttatgagtaacataattaaaagtaccataacgtatttagccagttcaatattaatggacctttagttgttttcaggttcttttcaaatcttgttacagacaatgctgcaatgtgaacatccttatacatatatacaactatatctaaattcctagaagtagaatgtctggaatgaaacacatacaaacttaaaatttggaaagatactacctaattaccctccaaaaataatgtagaaacatacactcccatcaaagccaaacttttattgggttcctatcacataccaggtatcatgctagaggtggacagaatgtatttaagttttagcaaatacaaaaaataactgagagtggagctcaagtccaaggtttccacacagtctcaagcataaagatctgtacccgttagaaaaacgttcaattctgctaaaagtggaactacaaaggacagcataccctatagcagctttgaaaatagaatagagtactaaattccagattaaactgtaagtaattatgattgcagactttttttttttttttttgagacccagtctcactctgccaccaggctggagtgcagtggtgccatctcagctcactgcaacctccgcctcccgggttcaagcaattctccctgcctcaacctcctgagtagctgggactacaggtgcatgccacgactcccagccaattttttgtattttagtagagacagggtttctccatgttggccaggatggtctcgatgtcttgacctcatgatcagcactcctcgacctccgaaagtgctgggattacaggcttgagccaccgcacctggccaatggcagatttttgaaagtaatttttacttcttagtttctaatttatgaaagtaacttacatatatttttagtaatctttgcaaccatttcagagctgggtaaaccaaggataagaaaggtcagagctattgaataaatgaatattaataaagctagactgctagctttattaacatttttgagacagtacttttccaaccagttttaaatacataaacatttacaattctgaaaatttccacatcattaaaaatgtgtcaatattcataaattgttcattggaaaaagaaaaagacaggatagcagaacataacaaacctacaattaggaacatttaattatttgttgttgttgttgttgagatggagtctctctctgtcacccaggctagagtgcagtggcgcgatctcagctcactgcaacctctgcctcctgggttcaagcaattctcctgcctcagcctcttgagtagctgcgactacaggcgtgtgccaccatgcccggctaatttttgtatttttagtaaagacaaggtttcaccaagttggccaggctggtcttgaactcctgacctcaagtcatctgctctcttcggcctcccaaagtgctgggatgacaggcgtgagcccctgcgcccagcccacattcaaatttgacattaaattgtaaaatattgtggccgggcatggtggctcatgcctgtaattccagcactttgggaggccgaggcgggcaggtcacttgaggtcaggagttagagatcaacctggccaacatggtaaaatcctatctctactaaaaatacagaaattagctgggcgtggtggctcatacctgtagtccagggtacttgggaggctgaggcaggagaatggcttgaacatgggaggcggaggttgcagtgagccaagattgtgccattgcactccagcctgggcaacagagcgagactctgtatcacgaaataaataaataaataatacaatgtttttctgaaatgcatgaaaaattccaataggtgtatagtagcccaaaactacaaatgttacaaatgtctatagacatgacaagatacaaaacgtgacataaatctttcagaagctagaaaagctgtattgggcttacactttcaatttgctaaaagacacaacattggggtgagaacaaactcagttatagttgacacaagaaaatccagacctaggcggaatagggttcctagaaagtaaccagacatactaatgaataacataaatgaggtaatatgacataaaacataatggaaaaagaatattatgattattttcttcagtgtacagaagtaatggaagttctggactagctacataaaaaatattaaattctatgttctattaatacaaaataagtgtgtcgaattgtttgtcacataaaccaaaaaatccacacaaatctctttttccctgtaccctcaacttgcctgtttcctattctccactaaatgcttaaattcttcattttgcctagcccttgcacccaagcatggctgacaggatatcccaaaggcccaagattctatagtggctgtttgcaagagagaggaggctaaaagtaactgccatactggatccccttatgtgagaagaaagaaagtatcctgaatgcttctcacgtataaaagagcaggatggcagggtgtctgtgtggcccaaggagccagaggtagcaaaccatgggcaaaagaaatgtgaccaaaggctagaagagggaaggtctgcagtcagccttgtcttctacctctctggtgtttgcttctcataagcagagtccgtattccaaacatccggacactgaaaagaagactcctgctctggaagttgacaagaaggaatatccacaaatgtaaaaatgcaagatcaaggcttggcccagaaacgatgcctaaaatcaaggggttaaaaaaaggagagcagaagagagatccaagtccaacctggcccagcccaaagaaggtaggattcaaggagaagaaactaaaagagaagagccttggaccacatcctttcctacaatgggcagtcaacgaactttgccgttcaaccaagttacaaaagaaggctctttaatcccttctttggcccttaaaagcggcagcagggccgggcgccgtggctcccgcctgtaatcccagcactttgggaggcaggggaagaccgatcacgaggtcaggtgatcgagatcatcctggctaacagggtgaaaccccgtctctaccaaaaatacaaaaaattagccaggcgaagtggcaggactcaggaggctgagtcaggagaatggcatgaacctgggaggtggagcttgcagtgagccgaggtcacgccactgcactccagcctgggcgacagagccagactccatctcacaaaaaatacaataaaattaaaaagcagcagtaaattcattaatcagattcactgaaatagttttagaacaactgtaattgctcaacttaaacatccctttcctttctccccaaggatattgtgtatgtactatataattataaatgcatactattacatattatgaaatgtaacatataaaatataaatgttagttaattatattagtgaacatttatgagaaacattgagatgatctccctaacatgagagcctgggggaaagtgggactatcatgtctgtcttgcagatttcacctccccagagctcagccacttagtgctgttacacctttcctaccacctctgccagccaatcctgtcttgtggggaatctgacctccctattggctatcgcagacctttaaactgcctgctttgtgacatcattctcccaccaaaccgaccaccacctggtagcatcttggggtttcctgggcgtggcctgtaaatttgtatcatcacaaggggccagtgaccagtaaccagtgaccagtggccttcatactggacacatgcactggttggcttcagccacccagacatccgctagtatcgtctcttcttcccttctatctgcagttgatgtttcttcttctctgaccatgtcaggtaaagagagaaactttttaaaaaggttttcatgagatttctttgccactaaatttagatttctttccccctatattcccaaacagcttggaataacagggaaagtattgaagtagaaatccagagacctcatttcagttttggctttgacatttactagctgtgtgactttagataacttttattctctcacaaaatctgtttcctcatctattacactaggataatagactggttattccccctggcccttttcttttctaatactgagtcttaaagggtatacgtatagaaaatgaaatcagagactttctgagagtgttcatttcaacagaaacagagaaaaaaccaaagtggtctagaaaactagcaatatattctgagatgtttcatgtgtaatagcctccctccactaatatttcaactttcgtattttaaatttagtgatgtttagtgatgttttaaataatattcagccaggcacggtggctcacacctgtaatctcagcactttgggaggccatctccctcactaatatttcaactttcctattttaaatttagtgatgtttactgatgtgtagtgatgtttttaatattcagttgggcgtggtagctcatgcctgcaatgtcaatgctttgggagcctgaggtgggaggatcgctttgggcctaggagttcccggccagtctgggcaacatggcaagaccccatctctacaaaaactttttaagactcagccagggttgggtgtatgccagctacgcaggaggctgaggtgggaggatcagaggactgcttgagcccaggaggctgagactgcagtgagccatgttcataccactggacttcagcctgggtgacaaagtgagaccctgtcacaaacaaacaaacaaacaaacaaacaaaaaagaaaagtagtattcacgttttggacattcctatctaaactaggtggaaagagaaaatggagagtactgggttctaaggaggcaggtattctagggtaagtaatttggtattttaatttaagcagaaagacatggtcccctacttttccccttgggatatgccctggagaatgacaaaatgattttaaaagaaaaaaatatattttaaatttgaaaaaaaaaagcagaaggacaacagagtgaaatgtattcagagtagggcaaaatgaagttgattttagcaaatgcttagatcaatggacgaggaaggaaacaggctacattacatatccctaggaaaagcagcttatcagaagtcatattcagtcacttttttctgttgcctttttgaacatagatgacacttgacagtttgtaatataaacattttggaaatatgttttagaggccaggctcggtggcttacacctgtaatcccagcactttgggaggccgaggtgggctgatcacctgaggtcaggagtgtgagacaagcctgaccaacaaggagaaaccccacctctactaaaaataccaaattagccgggcatggtggcacatgcgtgtaatcccagctacttgggaggctgaggcaggacaatcacttgaacccgagaggcaaaggttgtggtgagccaagatcgcgccattgcactccagcctgggcaataagagggaaactccgcttcaaaaagaaaaaaaaagaaagagagaaatatgttttagaaatgaggcttccaggcagggtgcggtggctcacacctgtaatcacagcactttgcaaggctgacgcaggcggattgcctgaggtcagaagttggagaccagcctaggcaacatggtgaaaccccatttctcctgaaaatataagaattagctgggtgtggtggcgtgcacctgtaatcctcctacttgggaggctcaggcatcagaattgcttgaaccagggaggcgcatgatgcagtgagccgagatcgtgccactgccctccagcctaggcgacagagcgagactccatctaaaaacaaacaaacaaataaacaaacaaatgatcaatgcaggtatctctaaaagcttaccaccaaggaaaatgattatatccatagatttcctcccccaaaccagcttagtccacacgtaaatcattagcaactcagccctaactcattttatcacagttacaagagaagttagtgagaaaagcactaactaggaaaatgaaaaccaaggcaatccaagtcaacttgggctcactgcagacatctgttccttatgcttgggcacacagcacaactcacaacagtgcctttttcacagacccctctttaatttcctccacaaaacccatcaggtcaccatagttcatgatgtttcaaaataaacaaccatcatgagaaaaacatgcagtatgtcttacaatcttgtattccttaaaaatatgacaaggaaaaaacatgtagaaaaaccagaggatttaaaagcaatctacaggccacgcacggtggctcacacctgtaatcccagcactttgcgaggctgaggcaggaagatcaaccgaggtcaggagtttgagaccagcctggacaacatggtgaaaccttgtccttaataaaaatacaaaaattagccagggatagtggcggcacccgttatcccagccacttgggaggctgaggcaggagaatcacttggaccaaggaggcagaggttgcagtgagccaagaccgtgccactgcactccagcctgggcaaaagagtgaaattctgtctcactcttataaataaaataaagttaataaaacaaaagcaatttacattctacagacatactaatgaatgacataaatgaggtaatacggtataaaacaaaatggaaaaaatacattatgattattttcttcagtgtacagaagtcatggaagttctggactatctagctacataaaaaatattgggccaggcgcagtggcacacgcctgtaatcccagcactttgggaggctgaggtgggcagatcccaaggtcaggagaccatcctggctgacacggtgaaaccccgtctctacaaaaaaatacaaaaaattagccgggcatggtggcgagtacctgtaatcccagctactcgggaggctgaggcacgagaatggtgtgaacctgggaggcagagcttgaagctagcagagatcggccactgccctccagcctgggtgacagagagagactctgtctcaaaaaaaaaaaaaaaaagaattgtctattttgttaatacaaaataggtatgttgaattgtttgtcacagaaaccaaaaaatccacataaatctcttttttcctgtaccctcaccttgcctgtttcctattctccactaaatgcttcaactcttcattttgcctggcccttgcacccaagcatggctgacagaaaatcctaaaggcccaagattctatagtggctgtttgcaagggagacgaggctataagtaactgccacactggatcctcttatgtgagaagaaagaaagtatccagaatgcctctcacatataaaagagcaggatggcagggtgtctgtgtggcccaaggagccagaggtagcaaactgtgggcaaaagaattgtgaccaaaggctagaagagagaaggtctgcagtcagccttgtcttctacctctctgctgtttgcttctcatgaggagagtccgttttccacacatcgggacactgaaaagaagactcctgctctggaagttgacaagaaggaatattcacgaatgtaaaaatgcaagatcaaggcttggcccagaaacaatgcctaaaatcaaggggttaaaaaagggagagcagaagagagatccaagtccaacctggcccagcccaaagaaggtggaattcaaggagaagaaactaaaagagaagagccttggaccacatcatttcctacaaggggcagtcaacgaactttgctgttcaagttacgaaagggggttctttaatcccttcctctggccattaaaagcggcagtggggccaggcgcggtggctcccgcctgtaatcccagcactctgggaggcagatgcgggcggatcacgaggtcaggtgatcgagaccatcctggctaacagggtgaaaccctgtccctactaaaaatacaaaaaattagccggctgaagtggcaggcgcctgtagtcccagctactcaggaggctgaggcagtagaatagcgtgaacctgggaggtggtgcttgcagtgagccaagatcacgccactgcactccagcctgggtgacagagccagactccatctcacaaaaaatacaataaaattaaaaagcagcagtaaattcattaatcagattcactgaaatagttttagaacaactgtaattgctcaacttagacatccccttcctttctccccaaggatattgtgtatgtactgtataattataaatgcatactattacatattatgaaatgtaacatataaaatataaatgttaattatattagtgaacatttatgagaaacattgagatgatctccctaacatgagagcctgggggaaagtgggactatcatgtctgtcttgcagatttcacctccccagagctcagccacttagtgctgttacacctttcctaccacctctgccagccaatcctgtcttgtggggaatctgacctccctattggctatcgcagacctttaaactgcctgctttgtgacatcattctcccaccaaaccgaccgccacctggtagcatcttggggtttcctgggcgtggcctgtaaatttgtatcatcacaaggggccagtgaccagtaaccagtgaccagtggccttcatactggacacatgcactggttggcttcagccacccagacatccgctagtatcgtctcttcttcccttctatctgcagttgatgtttcttcttctctgaccatgtcaggtaaagaaagaaacttcttaaaaaggttttcatgagatttctttgccactaaatttaggtttcttcccccctatattcccaaacagcttggaataacagggaaattattgaagtagaaatccagagacctcatttcagttttggctttgacatttactagctgtgtgactttagataacgtttattctctcataaaatctgtttcctcatctattacactaggataatagactggttattccccctggcccttttcttttctaatactgagtcttaaagggtatatgtatagaaaatgaaatcagagactttctgagagtgttcatttcaacagaaacagagaaaaaaccaaagtggtctagaaaactagcaatatattctgagatgtttcatgtgtaatagtctccctctactaatatttcaactttcgtattttaaatttagtgatgcttagtgatgttttaaataatattcagccaggcacggtggctcatacctgtaatctcagcactttgggaggccatctccctcactaatatttcaactttcctattttaaatttagtgatgtttactgatgtgtagtgatgtttttaatattcagttgggcgtggtagctcatgcctgcaatatcaatgctttgggagcctgaggtgggaggatcgctttgggcctaggagttcccggccagtctgggcaacatggcaagaccccatctctacaaaaactttttaagactcagccagggttgggtgtatgccagctacgcaggaggctgaggtgggaggatcagaggactgcttgagcccaggaggctgagactgcagtgagccatgttcataccactggac

SEQ ID NO: 427 - DNA, 391273 bp, Homo sapiens
taatgatcgtttcatggcgtttgttttgtgctgagctccatattgaacctgcctatatgtgctgagctccatattgaacctgcctatatgggaagctgagctcacagtctggcccctcatcacgatctctcaggcagatttctagcctcaaaaccttctgcttctttgaaatccatattcaatttgtcattcagtctgctgctacttttactgaactattatttcatggacagttgagaaatggaaagatcttgatgattagttgattttcttcatttcaccaacaaggatattgacatcgggccatgctagtaactttctcagtgtcacgggtcatatgagggtctagtgctggaatctgggctcctggtctggttgtgtatctgtcacctctcgtcctgggatggttcctcaggcctggtctctgtcagggagccatccaaataaatgctggctggtcgtgctttacccaagttttctgctctgttgcttttctatttgtggcttctgtgtgtgagattttttttttttttttttttttttttttagatggagtcttgctctctcgccaggctggagtgcagtggcaccatctcggctcactgcaacctccgactcgctggttcaagtaattttcctgcctcagcctcccaagtagctgggattacaagcaggtgccaccatgcccagctaatttttgtatttttagtagagatggggtttcaccatgttggccaggatggtcttgatctcctgacctcgtgatctgcctgccttggcctcccaaagtgctgggattacaggagtgagccaccgcgcctggccctaactgtgtttttatgtcacttccttcttaaaaactgatgagcttacttccttcttaaaaactgatgaacgattctaatatttgttttatataatatctgctttagaaatctctcattgattttaaacatatttataaatgccacattctgactgtcttcatcaaacatctagctgagaaaacttgggaatgcagccaagaggacctaacacaggtattcacatgcttggtgccagtgagaatcagcttaaaggggacttccgaaggccaaaaggccagggaactagccttttagagccaactacatgctggactgttggtatattttatcttatttactcctcagataaatattatgtgatattcttttattacatcatttcacaagctgaccaaagtcacgagtacaggcccacttccttaggaacctaactgagtctgagtttggaaaatacgcttttcataccatttacaggagccgcgttggcaaagcaaggcgttcactctctgatcctttttctttttgtaaactctgactgccagaacaatcttcaaataacatgtcattatcagcagccaaaaaggaagcttggacccttttgaatttgaagtttgcacagcagtccttgttattgctttccatcttttctcactgggaaaaaatggctcccgaaataagaatgttcttcgtgactccatttagaaaattggtcatctcgtctgtgcatcaccagtgtcgagaactgtgctgtggtttttagtacagctgtctagcaatttatctttgatagtgaaagaaataccatggccattaatccatgaacagatgtctgctaagctttttgtcatatcatctgacagctgaccaaagccataagtgtgtgtgtggaaggatgtcgggtgggtgggaggcctggacagcactcagctctcagagttcataaacattttgagatttctccattagcagggagaaggagacaaagagtgagggagagagagggaaaaaaatattttagagacctcattataaatacttggaacaaataatatcagtgtttttcctagggaacaggccaaagatagacttactagtttcaactcatttctgtctgccagccaccaaatttctttgctgaagggttagggtggaaaatgccggtaattctaaggggaagcctgtgctatcagcaactctgacaagctaacaactggttagtttgtataggagcagcctctgagggggacattcttattgaaaaagtgagcaagtctcatgctcccggtctggtctatggtacctatcaggttcagaatatcttgatgcttgtgtgtgacttcttttgttttaaatgaaacacactgtattaagatagagtcaccaagatgagcccagaggaattatcaaagtcatatcttgctgtgtgaacagctttgtgtcccagcccccagagggctttagttgagatgttggtggcattcggtcaggaattgtcaagtctgagcgctttgaatgccaagcttgagcggaattttgatcttgatatcctgttccttgtatcaaagctcttctgttaagaaaaaaagtggccctggttcaaatatgggctaatgtcactgaggaggggcagaaaaaagtgttactggttggcattgcattatagacctaatatgattaatatttgtaatccgacaatctaattttcagacccatttcacttggtttgattaaagaattgtcagggaatcattagaaaatgtataccagttccttgtattttgtccaaggagatttttctgggatgagtattatctataaattcttgtgcttatatttcatcatggccttaactatacttgcactctggtaaagaacactgatatctcgtaattatctaattaataacttctgatattattaactttttttctttttaaagacaggatcttactacgttgctcaggctggtctcaaactcatcagtccaagagatccttctacctcagcctttggagtagctgggactgcaggcaccaccaccacacttggcttcattttcctttaacattttaacatacaacatatatgagtatttacttactgagtggcaaacactgttgactgaatgtttcaatgtctcctctgtcccttgtggaaggaaaactcgcaggctgctgacagttcctttgaagcctcagtgtgcatttgagatggcttcttaaagccaatgattgagaacgtatgatgaaacaaggtagatcaaatagtctggtcttatggaaccaggagccagctagagagctcgagagagtctgattgcctgaggcatcctctgagagctctagatatccatttcttgtttcttttttgcctcttcagctcactttccaagttgtgcaattataacttggaaacgtgctgtgccttttattgagggtgttgcccccatggaagcagcccttgcaaggctatggaccaagtatttgtgtcccctccaattcatttgttaaatcctggtccccacagtgctgctattgggatgtggggtctttgggaggtgattgtgttatgagagcaaggccctcatgaatggggttagtgcccttatgaaagaggttccagagagttcccttctctttctaccatgtgagaacacagaaaaagaaggctcttttctttctattctttttttaaattattttttattttatgagacagggtcttgctcagtgtcacctgggctggagtgcagtggcatgatcatagctcactgcaccctagacctcctgggctcaagcaattctcctgcctcaggctcctgagtagctgggactacaggtatgtgtcattatgcctggctgatttatttttatttttattttttagtggagatggtctcactgttttgcctaggctgcttttgaactcctgagctcaagtgatcctcctgccttggcctcccaaagtgcttggattacagatgtgagctaccacatgcagccaagaagaaggctttctctgaggaagtgggttctcaccaggcatcaaatctgctcgtgccttgatcttggacttcacagcctccagaattgtgagagataaatgtctgctgtttataagccacctgcagacatgagaggcagtagggaaagttaagatcagagttagggattccttaccttgtagagggccattgctatccctctgactcagatagagcttctgcagcagggtagattaatggtagattcctagtctatccaagtgtgtgcataatgaacaatgagtgaaaagagattgctaaatatttacgccctgggaacatataattttttcctgcattactgaatataccactgactgttttggctagggtgctctctgtgtgtctgtgtgtgtgtagggaaggggtgtctttgtgaagctataagctgaactactcaacagttatcacctattatatcttgtttttatgcaaatcccaaattgagtatggagctgggggaagggggcatttcagttgtcaccctctggaacaagatagatcctctgcattgatcatccactaggaaccagggagcagagaagtgggtggaagcgagtgtccctgagagaaggcctgtactagtctgcgtgggctgccataaccaggtaccagagactggggggctcaaacgatggacatttattttcttcctgttctggaggctaggaattggagttcaaggtatcgcagggttggtgtatgggaagcctctctccttaggtatagatggctgctttctttgtgtcttcacatggttccctctgtacacttctgtgtcctaatcacttcttcttcttcttcttctgtttttttttttgagacggagtcttgctctgtcgcccaggctggagtgcagtggcacaatcttggttcattgcaagctccatctcctgggttcaagagattcccctgcctcagcctcctgaatagctaggactacaggcacccgccaccacgcccagctaatttttgtatttttagtagagacggggtttcaccgccttagccgggatggtcttgatctcctgacctcgtgatccgcccgcctcagcctcccaaagtgctggaattacaggcatgagccactgcgcctggcccaatcacttctttttataaggattccagttatattagattagagcccactcagatgacctcattttaccttaattacctttttaaatgccctattccaaatacattctgaggttctggggtttagaactcaatgtatgaacttaaggggatggggacacaattcagcccctaacaaggactgacccctggttttgtgtttaaacacatggttactattagtatggactagagatgagaatacgcccatcttttcttcactagggacatgggcatcactcacattgcagacgatgtgggtgattagagggcacaatgggattccccgagcaaagcctgatggcgcagcctcaccgaggctcccactctgagcccaggctggcctcgtcatcggtgccctgaagtctgcgtaccttctggaaagcaaaggaatctttctaccctacccacgtggcctgcgacagctcactaataactgagcttgctttgcttcacacacctggcttttgctgatgacatcatcgcctctgagatcatccgggagggaatggcctccctgctctgggctgatctgagcctcagtagagatatttttacaatgactgctttgcccagagacattctacagagatccttgtttatctctaggcactcgtctaccttgtgcttcagtccacctcagggattgtttgactccttcctaggtgcattctggctttatctccagagtttgggaggagaaactgctttctacaaagggcctagatctgacagtcatagggcagaagatgagaccattaggactgtgactctcagccttttaattccggattaaaaaaaaaatcctttacaatgatttacaagatgattctcctaagtagtatgagttaccctagggcagggcttctgacctcaacactataggcaatttgggctggataattcttagttgtgagggctggcctgtgtattgtgggtccagcagtgtctctggtctctatgcactagataccagtagcacccctgagaagtgcttgtatattgccaaatgtcccctggaggagtgacaaagtcacccacagggaagaagccctgcgctagtacattataaaaatatgttcaatctaacttttttgaactatgtctaatttcaaagtaaatgatctgttccatcaattttgattcaaaaaattgaaacaaacctccaggatggtttggatgttacatccaactgcaatccacacattcatttctcagtttaatctctctcttcctttagccatcccttcactgtacaggtgcttttaaaacctgtgatggcctatagtaggaagattataagtattattttcttttctctcttcatttcgcctttccttcctctaccaattcctcagattacaatagattttctaacctggtggtaattttgtaattcttgctttgaggttttgagttcattgtattttcatgaatcctgaggattgacttagactttttctcctttttttcatagacctcgctaatgtcaaattgacttgaaaacatgatttattcactttatttcagagtcctgctcaaaggtaagtgcagattataaaacagtatgttcaggccaggcgcagtggctcatgcctgcaatcccagcactttgggaggccaaggcggttggatcacctgacgtcaggagttcaagagcagcctggccaacatggagaaaccctgtctctactagcaatacagaaattagctgggcgcagtggcttttacctgtaatcccagctacttgggaggttgaggcaggagaatcgcttgaaccttggagtcggaggttgcagtgagccgaaatcgcacccctgcactccagcctgggtgacagagtgagacgctgaaaaaaaaaaacaaaaaactacccagtatgttcagtgtgatcccatttttccctacactgcccactgcccccaacaaatccacatgtatagagaaacactcaggagaatatgttccacactcaaatccataccctacatggaactcttagtgaacctgtttcttctttttgttcctttatagctttttaatttttcctacaataagcatctattgcttgtggaattgaaaaagaaaaaaaatgcttgaaaaaattattctcaagctccctgtgaaatcagtgcaagattcagcacgtaccccctggtgttgttaatggtaacaagagttgtattggaaatgacacttatttttggaagacacagggacaactgagtcacccatagtattttaggggaaagaatgaaacaagaaaccccaaatgaacaggtgaagatttactaggcagatttctgtcttgtactgaacgttttttgggtcaagattatatgcatgtgcatgagctcagatggaactgtcctgacctgtggaggggctgaatttagcagtgagctcaggctcaggtcacttagagtcatccagcagaaaatggctggtgtatcttggggctttgtatgcttaagagctgtccggcaagcacgcagcattcctagagcacgctgggctcgcctgtctcccattgattcaactcacagacaggcttgtgctcagtcaaaacatgtcagtcattgaaagtatattctcactggttagtgtccttttagaaaccaaactcagctttcttcagggaaacaatttgtgctgatgggtacacctctttctcttcatcctgtgcacagtaagatgctgctatgagggggtgtctgttcatgtcagccctgcttgtgagaatggtggagagggaaggaggtggatgggtgcagctgctcaaccctgagtgcacagcttcatccacaatgtgtttagcaccaagcttacatggtttggaagaaagatgacaggcttgggagatagacacgtgagattctcaatccgatttcaatcaaatattatgtataataccttacatgtctggataagttatttaacttcccagagcctcagctccctcatctctaaaatgggcacaaagcagacttcctgtcagatttcttgtgagcataaagataaggaacgcatgtgaggaacagcctggtgtacagcaggtgttcgctatttctttccctcgggtcagtttccagtttccaggtgtgttgctaccaatcggcacaggcaagcgttcacaaacgtttcctctaaagaaacagagagtaaatgctctaggttttgtgagctaggaggcaaaattaaggatattatgtacgttctttcttacataataaagagaaaacacatttccaccaattgttactgatttaggaatataataatacaaatagagcacagttttttttctaacatagatctactaatgaaaagaaaagaacccttttctggggagatagcgttttacttaactgaggttcaaagttagagttccctcttatcaaggggattgccagtgttcatctgtacaaaccattcttaatttgcaggccatgcaggagcaggccgtgagctgaattttgtccacaggccacagtttggaaatctctgctatggacagcttattaatagcaccaatctctgcttgtattctaactgtaatcattaatggtgagtaaataatctgaaatcataagtgatgaatgaactgttagagagctaccatctgcagagggggatgaaataattaattaaataaacaggcactggaagctgacaggatacttagtcttatttgatcaaataattgtgtgtggcttttttttttttttttttttttttgagacagggtctctctctgttgcccaggctggagtgcaatgacgtgatctcagctcactgcaacctctgcttcctgggttcaagcgattctcctgcctcggcctcctgagtatctggcattacaggcgcgcgccaccatgcccagctaattttcgtatttttagtagagaccaggtttcaccatattagttaggctggcctcgaactccccacctcaggtgatctgcccgcctcggcctcccaaagtgctgggattacaggcataagccactgcacccggccgtgatcagataattctttaaataatatctttctttgtggctaaaatctggaaaacagcaggaagaaatgatcaggccacacaaaccaaccacctactatgagagatcaggcagtggatgattgtgaaaagttactcaaataggttatttctgcatcgaatcaagtaagaaaaggacttgcttgtctttagtgatgatgcagctaaaggagggatgaagatctggcatgtaagtatcagagggtcccttccttccgcccttccacccacctggatggacaggtcagatggatctagttatatgacccttacacactcagatgaaaacaagaccaaaagactattatggggtatattcttcacccaaagggattacattttagcagaatgctaatatagagtgggaattatcctatggcatagaaggcaccagagtgggtgttaaggggaagcaacgtgacaagacatctttgataaccgagttggcaaaagaggaatgtccgtatttctgaatatttaagagatagatatggaaaagggtcaaaacacatagagcaagaagggactaaggtatatgagaaaagatccaagcaggcaagctggctctttcccatttgtgtggcagaaagcggggaccccaccgccacccatcatttgaaattcactgaaagcctgtggacatttgcagaagctgccgagccaatggtgctgaagctgcttagggcaaagattttaaaatttcagagtgttgaactgggaaagtgcttacaactccttgtaactaacccctccttggaaaactagctgttttgaggcagaaatattttacaatgtattgttttaactgaagggcaatttttagccaaagaacgtttagcaaatgagctttggtggtgggtttaaaaatatttcttctctgagctgatgctgacacagcttttctccatgtttgtgttaaaagaacacacaacaaaatgcattttctcttagtttaacaagttggaataaaatacacaatttttataaagataaatgtcaagaagaaaaactgaagtatacttccaagcaaaatttattagatgtctattcaagaaaaacacaatgacctttgcttgtaagaattcaaagtcaattacctggaagccaggtatgaatagttttttcttttaaaatcagatacagagagtagaaacagtaatttttcttaaatatgacaggcaacagatattgaagtcttttctcataaatggcatcaaagagaattattcatttatcagcaaagctgcatgcagttgacttaatttcaaacctgaagcctttaaaatatgaagctggttatgaacttgacagaaatcaaggtaggctactcaacgatgtttctttaccttcttcctaatgaaattcccttgtcatcagtcagtagatatgtacatttcatttggcttctacgatcttttaacttcatagatttttgcataaatgctatctgacagaatcacactatctaggggtgcttgtgatctgtgagataaggagaggctagtctgctgaaagtgttgtcgcaggataaagaccaaattaggaaacgcccctgttttctcaacaactagtctgtacaaaaaaagagcaaacatatgtacaaaattctagaggctacgtacattgtgaaaagatcaatatcactgtccatgaaagagatgccataaaaagttttatctgtaaggtgctcaagatccaaagatgaacagttcttatgcaaagtcataagaaatacaaagctagttttcggagcaggtgtaattcaggcactgtgaaccatattaaaccttccaggtcccaatatcattttttaaatttctgcttcagggcagaaaataaaacctgaatgatttaacattgcttctaaaaagtgcctaatttattcctaggaaatattttacacacaccaggaaaatcaggctcaacatattcctgtcctcaaatgtagccaggattctgagttccatagaagaaaaataattattatagtaaaaataattgtagtaatcctaatccttgctaaaaccaactttaatacttgtgatgcttctgtactctatttctataaaataatgtgtgagattctattacatttccataaaatgtacaacatatcatatggattatatgttctcatacaatctcaaatgtgtatgtgtacacacagtgaaatcttacctactagtattgcttacagatactttcaggtgtctgttagaataattctttgcacctctcactaacactgcttttacttacattttttcagataaataaaacactaagagctcattgttcatgatgctgatcattacattttaatataaaatagcgatgcaactttacaacacaatagttttcccctgtagcctagctcagcctcttgtattgtcatgattattaccgaaggcttttatttacttactgtttgcacttctaaaaaatgcaaacaaattgcagaaaaagactcctatttgaaaactcacattcaatcagcaaaatcacactcatccaaattaactcgcctcctcttgctttaaaggttgtaatcactgtgcatattacaacatgtatgtgcaggcaaacaatagctaaagtacagttacagttgtcatattgtgtaaaccaagacactaggcaaacttgtgaaaagaatacacactgccaagcgaagaatatgaaaatgcaaaccacagcattccccaataaacaattttctggtcgtcttgggggagaacatcgcctggggggagatgttgaaatggagccacgaggctggacagcctcctggagacactttttttttttttttttgcctcaaatatttgaccatttttaaatatcatgatttttttctttctgatcccacattttgacgtgtcaaagcttagagcaggaagtaggaatccacactttcacggagggggaccagcctgccatgtcgtccccaggctcacagcagcggcggctactctgctggtggtttggtggcaggtggagatggtgacggcgcattggaaaccgtaaggcatgacaacgggaggcccgcggggtgtttcaggcgcgttgacgcaggtgcatggctggcaggcggcctctacagaaggagggagcgcaattcacagcctcttgacgtagtttccggggaaagtaccaaagaatttggttcttcttgaggtccctgaaaatagaagcgagtcatgaaaggggggtgacaacgatatcagttcatacacatgggcttgaatacttcccatttacaaggcctcggaagacagcaagccccgaggggtttggaaaagaaggcaggcaactcacatgaagcccataggcagacaaaataagcagtgttagctggttgcctgacgctctcactgcccctccggcataaatgctgcgctgccatcgcggcaggctaaacagaaatgctgagcctcccaagctaaagggaaagtcagccctgctgaggaggggggcggaggagctcagtcactgaggctgccacaccagagtcgggggtgagggatcaaggcgaggctgacaggtgacagggtgagtggaaaatcctaagagcaaagcttctcagggaccagcaacccgcgcaacacaggtgcgacatgaagacatcatctgtggcaggctgtcgctgttccaacagttttatcatcttacagaagatcatggtcagtgccacatcatttatttaaaaacagcactgccagagtccttcatcgagtatacaatttttcaacaatttacaaatcattaatgaaaaaaaggattaagcactatttgtgtgtgggagttctatcagtggcatgatttttaacatggtgtgtgtttaaccacacgcacaaatggctatcataattatgttcgcctctggtttcaaataatgtaattccttggacacttcttgtaaaagttggtgcactaaattgctaaattcttctttaggcagcgcagatggaccggataagggtctctcaagcttcatctgtctcctatatcctggcacttactgccttggtttgatggctgtttttctttttccttggctaggcaagccattttacgtttctcctccctcctcctcctccctcctcctcctcctccttgtttttgagatggagtttcgctcttgtcgcccaggctggagtgcagtggcatgatctcggctcactgcaacctctgcctcttgggttcaagcaattctcctgccttagcctcctgagtggctgggattacaggcacctgccaccaagcccagctgattattgtacttttggtagatacggggtttcaccatgttgaccaggctggcctcgaactcctggcctcaggtaatccacccgcctcggcctcccaaagtgctagaattacaggcatgagccaccgcacccggcctttttttcttcttttaatggaaataaaatcagaggcttgtggccgcaccagggcctcaattctttcatgattttgccaccgatggatgtctagagtgagccctcctctcctctcacctttcctctcttccattctctgccctgcagcctgtgtttccttttcacctctttctgtggcccagtgtaaaatacttttgtctacaaatgttttcccagaagacctctcgtctttttttttaggatggtaaagatgaagttgccttttaagtgggaagaatggaacgtctctctgcttccaccacaaactaaagttaaggtgagtcactgaatgttcgggcatctacgtcagacctaggaaacgggagagctgttcacttaatctcactccctctgaaattagattctcactgtggacaactaacattttccacagcacagagcgttgatatttctcttctggggaccatttgttgttgttgttcttagatctcaatctttcctggtttttgctatttaaagaaattgtcttctctcagttgagttggaaataaagctcgcagaaaatcacacatagctgaagcagtgaatactaaactatattaaaaatgcaatagccttgggattacattgtgcatatgaatgtctgaaagatcaaaggcattacgaattcaaaggaagctcggccatcacagcaaaccacgggagtgagcaaactcaagcaaattacaaaatagccgaaggtgcctgaggaagaagcgcacatacccacaaaccagccgtcatcacacttttccatgacatcaatgacatcactttctctgagctccagctcatcttcattcctgggagtatagttatacagagcctgaaaccttaaacaggacaagggaatgtgtttaaaaacatcttgacaccttcatgaaatatagaagatagaacaatattcattcttcctttaacattcctattcttaacaacattctgttgggtggtacaagcctggtaagcatgtaaatagcattctattggatggtacaagcctggtaagcaggtacatagcaatatgtagatcttcacaggcattagaacactctaacaacattttgaaactcacgaggaatatccatgaaaattgtaacattcataaattggattaaaatatgtcaacatgtataagtcagacccgcatttcagttgtccagccatctaacgtctatcatttagacattaaataatagtacaaaatataaaataagtgatatttgtattatttaactgtttaaaaacaagaaggaatcacaattttagctagccataatcagaagcaaataatgggggcttgagaattgaattttcaaaggttctaaatggagatagacaaaatgtgtcagacatgtctttttaatcactctgtgtgaattactatacaaaggaaaattattttttttactaagaggaattctttagatcagtttaatgttatggtttggatcagtgttttctgaggatgtagaattggaagatttgatgtaattagcctatgaagttgagtagatgtattctatgtgcagttattactgattccatttcaagcagactatggacataagtctctttttaaaatgagtcccagaaaaattgtatttgattttaaaactctctcttgaaataattttatataaaaaagaattattgatagaatgctatcactttcctttcccggcctgaattctttgacagcatatactgtggtggaaattgatcaataatgaattcagacactgaatttgtggtaagaaaacaccatacattataataaatagtaacatgggctggtgtttttggaaaatgaaggcgaaattactgtagctgagaaggtcaagaagaatttgataggcagttaacatgaaaacttcttcataatagtactaaaatattaccagtactgtgagggggtttttaaaaattgggaatttgtttctgctgctttctgtaacagtcatgtcattctgctaatgtgagaaaataattaccactttctagggtattttagattttttcatgccaacttaaaaaagttgataatcttgactaccgctccggaacaagaatgatttatttttaattactttatgagtcagaaaataatattttggtagaacaaaactattctatcatttaaactcaaatcttatgtcattaataagcaacagtgacctactggcttccccccgttcatccagcatttggactgggggagctggatagagttggcttcagagaatgcctaacaacatcccctagaaaatattgttttccctggcctggcaccaaagcctgaaatttcaacattagaggcttcttctcctgttaaaacttcatccttccagtagaccttacagccacttatatccttttgagcatgggcttctgaggccttttcttgagagaggggtttgtgattatggggaagggcagagaaaggcagctagcatcccagagtagtggccaaaaagacaggcaggtgtggaatacagaaacgtcacctgatttggatgtttgcatgtggccagctttgctaggggtagtccatttattttgttgcttgtgtaaagaatttgatttggaggctgctcaggtgaaggggtggtatcttttgtgtatctgtggggaaagttcacggtcccttttccagtttcacatttgagagagatggtggttcctgggctgctgttttgatggatacacacggcatttctcactttgggaaaactgattcttttattgagcttctcaggcttgaaccctgcccaggctcatctccacccactcatggagaccggttacctaaggctgcaaacctcagctgctggaaagaatctcaaggtctcagagctaacgcaacaaaattggcacagactcctgcttcatttttgtctgatgaaagccagcatgtttgtccaaatttatttaccattctggtttaattagaccacagaaacaaaaacaaaacaaaagaaaacccacggagttttatggaaacgtaaacacaccttcaggaaatcctcctgcctctcctggctttcaaagccagtgttgcacaatgggaaatgaagacaaatccaatgttaaaaaatgctgttgtgaaagatgtgttggtgaggtgagtgatggtggtggggtaaggatgcctcaaaaagaaaggtgtcttttaaacaggaaatgctgagccagactggaagccctctcgataacttgcaactttttctagaacatatttcactaaaactctgaattgtagtgacataacattatgttcctactttggctcaaaacttatttttaaatgaaagcaactaagcaacaccctaaaatcccactaattcaggctataatcaaatataaatttaataaacaatgttttctaatatacaaatcaggactttgaaaatgtaacatatctttcattcataaacactttgaaagctgtttaatataacatgttggtaatgcaataaacctaaacagccctggaatttattttttatcatgtgatcttatcatcgtttgggtaaataagagaacaaacaaaagctttagaatgacaagtcgtatttagtgttttccagttaagcgatctttttgtttgtttgtttgtttgagacagggtcttgctctgttgcccaggctggagtgcagggccatcatcatggcttattgtagccttgatctccctggcccaagtgatcttcccacctcagcctactaagcagctgggactacaggcgcatgccatcacacctgactaattttttatttttatttttgtagagatggtgttttgctatgttgtccaggctggtcttgaactcctgggttttggccttccaaagtgctgggatttcaggcatagtgactgcacctaaccttcagtgagatttcaaatgattatcactgctaacctgttctttccaaaatacagactttcccgcaacaagaacacttttctgcctgtgctctgtgagagccagtctcatccggagctgctttttgctaagtttcaggtctgtgaggagcaaggaaggacttgatggtgataaaggcaccaggtcatatgccaggacctgccgcaaggaggaggctattgttagcctgttctgctccaggtgagcagagtgtgggcagtgggtcaggatccccagtgtgtgctcagatatgggggacaaggggttaggtccatgaataagccttcccaggggtctcactctcgactcacagtgtgggcagaggccaacaggaagctgataactcctgaacgtctctcagggacaaaatgggcccgaaaaagaaacacacagagagaatcttcaagacaacgtgtgacaccttcaggctgatttaactcatgtatcagaaaggagaaggaatttgaaaggaaagtttgaaaaggcattttcctggtgctgtggaagtaatcgcatgtaactgaataacagtgagtgttttaatactgcccttttcaaatgacccttctaagcatgtaactttggaatgatggaatgatcgctttaggtcttttttacactgaggtccacttttaccgtctcccagtgggtgtaaaagtaaggttagaacatgttctgtatgtctttgaagctcgcagttactcgttacacagccagcagagcagagagggagacagagttatccatcttaggaatcactgaagcattgggaagttttcctagtgtgtcaattaaaatcttctcagagaactatgggttcttttaaaaattagtttctggtcactgtcataaaagatggagagactattacaatttctcgtaatttaagaggcctcatgttagtttgatctttcacgtgcaaagccatacatcttacattttggtacagttgtccattttgtgggtcaaggttagtctcaaatttagaagataagaagaatacttacggttcccccccaccttgaatattttcatgagtaaacacaggacgctgtggctgaaatgaaatgattttcaatgtaatcaatgtttaaactggtactaattaaaagataatttggataatggcatggtacttttcttgacatttaatatttcctgttgtaaaaaaccaagaggaagaaaaaaaccaaataaaagctttctgcaggattaataattaaaatatttaaagggagctttaaattaaagcaaaataagcaaggtcaaatgttttgaacatgtctacaatctagtctgctcaagctttaaggaaaagtcagggtttggtcccattgatttttcaaaggccaggaataaggcaagaacatagacggcaaaccactagaataggaaatatagacaccttcatacaaccttattctccagcgttttctcaaacaagcagaaaataaaccacatttagtttaacagcaaagtatccacactcattctttcaatctttccttcacagacaacattttcacatacagcacagaggaaaatatcaataggcagacatcccatgctacatttgaattaacattttctgttctcaatgtggagagaaaacatgcatttttaaaaagagaaaacagaactttggaatgcaacgaacaatatccgggtaacatgtaacattttaccttagaagagaaacattggtagaaatttccagtgcactgaactctcaaaagagtttcttttctttttaaactaagcatcaagaccagtatctgtaatagatacttataatattggaaatgacaagccttagcatcccatatacccacattaatattttcagtgaatgaaagttaacatgtttgttgaatatataaactcagtgtaatttatattgactacctaaactttaccttttaggggagaaatgcaaacaaatcattcataatccatttcaaaagcatttgcttctaaatgatagctacagggtaaaatcagaatttgcatggcaattatataagtgactgtttgatgactactgaaatagctattagatccatgtccttagactttgggaccagttcttagatttccatagttatgagtggattactgataggctgaaatctcttgctgccaattgtccatagaaaccccactgatccaagcttggatggataattctgaggttcctttcagtctacgagtcaatgattcacccacttcctaaattctttatccaccccctttctatcctacttgtctatctagcataagactaggtactcacagtactaaaactgtaagctctgactcggttaactggaaacctttattaacagtgttcttagaaatttcactcaacagtctgtggatagaatatttaaaactagagtgcgtaagaattactgcacacaattatgacttaagagtgaaatagtttactcctgtaaatcaatatgactactaatgatgtatctattattaaaattggaagatattcatattttaagaaaaattatgactaaccagttttccaaccatcttaaaggtcatttaattcaagatattattaaatcaatttaaatatataagatggtaattgtaagtcattgataagcctgtatcatattacctatttcaagttctcttccagtccaataaaactttatatatgtataaaactttcatgcagaagtaagatttgtatacatcaattgccattaatattattttgtaataactttccagtctttttttctcagtcttctttcttatttcaaatgtctgcagaataatgttctcccacgtgtgtctacatatcatagttttcttaaccattcctctcttttttttttagttttgaagttagaattggtctagtctttttttttttgctatcataaacagcaatgctatacacattttttatgcaaagagctattttcttcttttgaactattctttagaatatattcccaggagtaaaacttctggccaaagagtatgcattaaagccatatgattttgagaatgtacatgttagtcactgaaaaatactgtactcaaaagtaacttgaaaatgtctaatatgccagactgcatatcatataccaagatagctactactctttccccaaaacaatcatagcaccatttgcagtgcataataaagttatgaataagaaaatattatttattcttgtcttaagagaaaatgttgtgtaaaatatatttcattatgctctaaaattggcatccctgttttcacacatttaaaccattttaatattttaaaattgagtaaaagtttcaacttctacatcatggcatccaatgctttgtaaaactggttagtttcatttcattgctcttttgttaaaatgtgaataccactttaaaaatcaaattgttcattaatgtaaaacaatcaacttttaaagtccgtatatccctttttagttatcatcattataattctactagtttaattcctttaactcaacccacctcatcaatcatttaactgaactgtcccattgaccattatgaaaatttggtgattgctgcaaacctgcagcttcctggatcccacgtccatggctggagaacgtatgttcctgtgtggggcagccagcaccgtccttgctttttttttttttttttttttttgagatggagtctcactctgccaccaggctagaggtcagtggtgtgatcttggctcactgcaacctctgcctcccgggttcaagcgattctcctgcctcagcctcccgagtagctgggactacaggcacgcaccaccgtgcccagctaatttttgtatttttagtagagacagggtttcaccatgttagccaggatggtctcgatctcctgaccttgtgatcttcccgccttggcctcctaaagtgctgggattacaggcgtgagtcactgcgcccggcccccgtccttgcttttacctgtttcccaatttctcttttcccttccttcatatctttcaaaccctgcccctctttttacacacaaatcatcagttttctatactgttcacatcctgaggccagaatcaatcaagacttttcgtagcagagaagttgtgtgtgtcttataatggcgagttttagaacttttcaaagcttacctttaacaagaatcacctccatgttaatgtggataactaggagacagttttgaggaaagctgactaattacagtacttgaaatagtttattttaaaggcatttgactagtagggaatgagtagcaagaacagttatctaagacggctcatctgcgtctttctgttttgggcgttaagcaccatataaccttggggatgcctcagcttccctatctctgaaatcaatgagttggacaagatgagggttaatcgggtcccctcagggattccatgaaggatacacatttccacagatgtatttcctctgctgtgtaaaggtgtccgtcatcagttttacacagagagctgggacactgacattgattggttaattctcatgtgtctcggtcacgtaaaaaaaaataatggttacaattcaactccattttgcagaatggtaaaccaaaacccaaagatactggataatttcttaatacgacaaataggtaaaaaacaaacagaaaaagaaacaaaatggtaatttcgatgtgcacgctattgcatgaaagattactatgatggactacttggcctaccttggctaaaatcagcatcttaattttgacgctgaggtaggtgcaaatgtcctataaggtgatgtaaatagattatctggggagactgtctttcgccctttccccttggtgatgtaactcaaatggcaagtcgcttaagcagagatttgtaatgcagctgcactctgtcgccacctagtggtgagcaatggcagcaacaagctgagagttgtttctgctttatctgcccctttttatccaagttcccaaggctggaaaaattttaaaagcctattttaaaggccgcagagtgatgtggaatagacagtcatctgttttcctaaccatgttcttccctccccacgttttaaatttttgagaaagcatcccttgtaaagccaccagcatttttggtccgtgtccatttctattttgactatctgtgcaggcatttccatttcccctaacttcttagcagttttaagataaatatagaacaatatacacttgtgacattcagagaggcttacatgagctgaacctagaaagatggctttcaactgacacattacaatcactgtgctgggcattttgaacaagaattatattatgcttatatttccttgatgaatcttaagagtagaacaagagaaaaatccagtgaagcatgctgcggttttcatcgtatcctaaatatgtatttttttctgtagccctgactatgtaagtatttttctgtagctattttttaatgttgtcaaaaacggatacaaaagagacaagttttaaacacatgctaatttccaaagccagaaccaatcacaagttgctgttcataaggaagctggtttgaaacatcatggagtctgtaacatcagtaaaatatatactttccgatcttagtgagctacagtctgttgaaaagccgtctaatttatcaaagcttctgcagttatctctggaggattagctatatttagtatcaaataattcttaaagaaggattgactgttactttaaacactaatgcaaaaaaatctctgaaagcaatataagcagtgctaaagtgtttttatctttttttataaaatattagttgtcatatttgcccaccagaattcgatgaaattctcctaataataccacgtttatgtttctagaggcttatttttccttcttaaattatgaaggtaaaacacaactttgcataaatctaaaaaaatagaatatttatggttcacacaaacacacgtgtaatctgacatacaaatacataatgtaaaaatcaggcaaaaaataaaaaaaaaaccttaaggggaacacaagcataccatctcgtggacccacaggagggttatagatgggtccttttcactgcaaaagaagcttatgttttgctttggctctggaaggccattcgggggagtctaagagtctctacaaattggcatttctgtctctatggcaacacaaagctctgcctcagcaacaaaatgaggtcttcctatgcaatgcaaaaagcacaaagtggcatgaatgcagaataatatcgacttttctttagaaataaaaaatgaagacttctgtgaaatcaagcccttgagaacttcttgaaatgcagaagcacggccatgcgataggccagtcaaggttgaatccgggtccattaaaacagaaatgaggaaaggaatcctgacttatgtccagatgaaaatttccaaactccttggctgcattccttagaattgatagtaagtaccatttagagtccatgtattttaaagtactgtagatactatggaacgaagtagctaagggaaagtaatttgacctttaagttcaatcagagctggcaagaaataggaagtggatagaatccagacagcagtatggggacaaaaggcagactgagaggatgtagtgcacatcaccagagaaacagaagatgttagacaagaatcatggatttaaaaaaaatccaaattgaatgacacagaagcaaacatgaccggaagtgtgtgagttcggcactgtagatgcttggcaacagttttttctttgcaggagaaacggtgactagaaagcagtgatttagtgtagaaccatgagacagatgtagaccacaaaacacacgacactcttatttgtagagtagagaatctgaccatgtctttgtggagtttggaaacctcacacacacctaaaagggaagcacatcaccaggtggtcgcttcatcttcagggtgtctccagcctcactttaaggccagttcacagcaaagacaactaaggaagagccagccctgggggcgggggaggtggccaggatgcctgccacaaagtgggggcatgctgaccctaccctgtgggaaccgctgagccctctgacaggtgagccgcagaatctcctagacatcactgggctacgaggaggcttacccaggacacatatctcgctttttacgtcagcctggaaaatgtacaagaagttagttagctctcatcttcgtcacacagacttcaggaggagctttcctggctggctttttccatgcacacacagcatgccaaactcctgcacaacagcagggcagggagggtccacagcttctccagctgcttatacagtttccacaccacaggcaccagctgccatcttaacatggcacccacaggcacagcagaaaaaggttcacagaggaaagctggcatagggaagaggccaagaacatataagaaatgttatatctttttttgtcttttatttttttgagacggagtctggctctgtcgcccaggctggagtgcaatggcacagtctcggctcactgcaacctccatctcccgggttcgagcgattctcttgtctcagcctcccgagtagctgggatcacaggcacccgccaccaggcccagctaatttttgtatttttagtagagacaggatttcaccatgttggtcaggctggtcttgaactcctgacctcaagtgatctgcctgcctcgggctcccaaagtgctgggattacaggtgtcagccactgcgcccggccaagaaatgttatgtctttcatagaatgcttagcaattgggttcaagatgctctcaaacctgccctgctttttcatcttattgaagggatgcaaggtgagatagaggagaatttggcttaatgcctgtcaaatttcatggactgtatcagacatttgttggaggcaaaattttctaacacataagaagaaaataaggcctttttggggggaaacatggtgaaatttgatgaactactgaagtgccaacctgtgggctggactgttttggtgttttttttttattttcagagtaagatctttcatatgacagtgagtaagctgaccttcttttgtgtaggttttattttccttccaatagcggacaggatctggcagtgtactgcctggtatttgatctggcttaagagaacttccggaggaataaaacacgcttaaataaaagcatgtggttttctcaactctcatttagaaaagttttcctaattctcagtaatgattgacctcaaatccccagcctctcgggatgaaatgtgtttggcaccgttgcttaagtgtcgtggcagacgatgcttgatgctctccacatccattctcttcttggtcctcagtaatggggccaggctgttgggtaggcacatggccattctggataaagaccacatttcctgacttgtagctggatgtactcatgtcataagctgagaccgaggggatatatgcaattctgggacttggccttcaagggagaaggtgtaatctcccatcttttctccttcctgctggttcgtgtgagaagggaactactcgagctgccacctgggacccatagcggaagcttctctctgaggatggcgatgagcccacatcagatggaaactcctgggttctctgatgactgcggggccaccataccagtcccggacacccttcatttatgtgtaagagcaatatatttctacgttgtttaagctataattattttgagttttctgggactgtgcttatcccagtcttgactaatacaggggttcaatgcatatcagagctcttagagaaaaaaaataaccccatttagcttttagaatgatgtggatcataacagctggaaagagcacgtgaacatattaggaaaaatcagggcctgatttcatgttgaaaaccgtgcgccggggatccccttctgatgggactgctttagggtgacgagacttcctggtgggaccacaaccactgagttacttggaagaaacctaaaaaagagcctctcactctcctcacagagcttccgctgcaacttgagaccacatgcggcaagtctcttgcaaaatagtctctcggatggaaatggaggctcagcttatagaggagctgagatttatactattttttttgagatggagtctcgctctgttgccaggctggagtgcagtggcacggtctcggctcactgcaacctctgcctcccgggttcaagcaattctctgcctcacccttccgagtagctgggattacaggcacctgtcaccacgtccggctaatttttgtatttttggtagagacggggtttcaccatcttggccaggctggtcttgaactcctgaccttgtgatccacccaccttggcctctcaaagtgctgggattacaggcatgagccaccgtgcccagccaatttatactattttttgttatgaaaaaatcattattttaaaagcagatgctcagaagactgggggaaatattggattcagatttatacattaaacataatttatgtatctttcagtcatctgtaatctataaagtggtaggaacttttacgtttatggaagattctggattgcatttacttttatggagattgtcattgtcttagaaaacactttaaagaatgaaattgcactgacttaacatgagttaactaaacaatggttgatggggttgataaaaatgttattacaatgatttcatgcgtgctatactatgtcattaaaacattactaagagtttattttctctttgctttcagtgctgggttatttcttttctttacaatgagcatcagcattcttgaaatggaagaaataaaaaggcttcggactcagattggcagagtttgtaactgggtcagatgcagaattaaactataatggcctaaaattacgagttgattcaatttgtacttaaatttacaagcacaaataacttcagtgaatatattctttcaatgactacaaaatagatttataaggtttaaaaaaactcagtgggagattcaaaaattgagatttcctcctaaataggagataaaacagagaaaatcactttgatttgctggagttagtcagaagtatctcatgtggtcattaaaatattcttttaaaacatagttattgtgaatacctccattctctcatgtcattctgcaaacaacggaaacttaaagaatatacgagaagaattttgttcttgcagaagagtaaacctttttaaatcctggctttgtcctgatgctacgatggtgcgtcctccgtctttccaaattagagaactcagattctaaggctactttccctcttattgactaagcttaaaaaccgaagaacaagttaaaaaaaaagacaagaaataaataccttggccttaaaaataaaaccacagacagaagagaaaaaaagagaaattcttagccttaggcatcatataaagtggcattatttaaaacatttcctaattattttctgccagctaagaaaaaaaacctcaaagagcaaaagcaattaaagtgtttcattttttacaaagttcctttcacgcctaacaggagcacatagatagactatgtcagcgaatgggtttggtggtagtggttttgagattgtataaatggcacttcctaatacagaaccttagctgtattagagccctaaatttttacttatgtgcagaggctctcatttcacattcaaaagactgaatgtgagggtgagctattgtttgaagtctgtcaccttttttccaaaggaaaatgttttaggatcattctgaacatagaaggaaaacatttcagtgatggactaatttcatgctgtggttgtcattaaatctctttccaaggccagtcattaattttgttaaaataattttttaaaaatagtatctttaggttaaataccagcggaactgtcagcctgcaagtctcagagatggatgctttgtgaagtgctacaaaaggatgatccttcccacatcctcatgaatttacgtcacttttgtggaagaacaaggctcaagacagtcaatgccaaagatcatcctgtctccaggctctgctgaacctgccgatcggtgggaaatgacgggagacaatgagtccactgagaggtgatggagaatggcaggcactgagctaagataccttaaatgtgatgcttctcatgctgacggccaactgaaaacaatctcatcattacttcttattatgatatacattttaatttgtttttctcctcaatctgggtatagctgctatgcaaatatgtcttttaaatgtttggatagaggccacgcccatgatgttaaaagttagcaatcagtatttatgtaacttcgtaggtcttgtgagagggcgcaaatctgaatgcatacatcttactaattaagctcattgaagacatgcaataaaccacactcaagatgcagttacctttaattttggtggattgatctcctgttgataagaatatttagggaggagaggaggtgagcagggctgagaaagtgtagagtccaggtcagaaacagaggcgaagagagaatgaaatggaggggaggaaagcaggtggctgggaaagggtgtgggtgcttgctctcccgaagaaaatgacggaggcttaaatatcgaggaaagacgagaggtgattatgcttgtctcagaatgaggttacatgctctttacggaatttcctctcaacttccaacattttaaagttactaataaccttgggaagttatatttatgacaaattttttgctttgaaaccactaacttcctcttttgaatttgattcaaaatccccaatggtatgatcagtttaatttttcgcatgggggtggctggagataggaacacctatattctatcattttctcatatatttatatgatggctccttctaaaagtgaaggaaaaaagtatttaaaaccctgcaatgactgtaacttgcgtgtaaagtaggttgccaactatagtcagcgtgtcacaaagctggggaagccgtggccccgcgtgcagggtgtgagctggtgctgggatgagccggcctagggtactgtctgtgtcagcaaagccacacatctaatcacaccttcagattgattgaattgaaaggaatattagttactgaaataattgatgtagagacacgtttggctccttgcaatgaattatctatctgttattaaataaggtgtttgttttacacaaatgcaggcctggccgggttattttgaaatacaggaactatgaaagaatttgacttggatagtagcgtaataggaaccatcctttctgttatttcataatttctataattgccagtaattatacttgcttcttaattcacagggtacatttgtgggatcaagtttctttttatttttgaaatggagttttgctctttttgcccagaacggagtgcagtggcacaacttcagttcactgcaacctccgcctcccggtttgaagcagttctcctgcctcagcctcccgagtagctgggattacaggcacccaacaccatgtctgactaatttttgtatttttagtggagatgggggttttaccatgttggacaggttggtttcgaactcctgacctcagatgatccaccagccttgggctcccaaagtgctggattacaggcgtaagccaccgcagctggccttaagtttctctttttttttgagatggagtctcgctctgtcacccaggctggagtgcactggcacgatctcagctcattacaacctcctcctcccgggttcaagtgattctcctgcctcagcctcccgagtagctgggattgtaggcacccaccaccacgcctggctagtttttgtatttttggtagtgacggggtttcaccatgttggccaggctgatctcaaattcctgacctcaggtgatctgcctgcctcggcctctggaagtgctggcgttgcaggctcgttttttgttttaagagagaggtttgcaagctaaagtttctggatattttctgcctttgttgattaaaaccactgttcaagattcttcataacatgaagatacagtacccagttcttaagtagtcaatgtgaagtcaacacaaagagaacgacctctttagaaaatcgaaaggggacagaagtgctgtttttcttttctgttgtctttgtttattattagcattattatttttgcaaagtgccgttatgtcaaaggtatggtgtacagtttctcatcctggaataggacaaatttctgggcatcaacttcctcttctctaaagtggggatgataatgtcacacacctcactgggttttgacgattaaagatgtggagtttttagaatagtgtctgatactcagtaagagctccactattagctatcattgttaatattggaagattacaaagactatatcaattacaaagacttttacaatataagtttatggtcctgaagaaaaatgggataatggaattatatcacatatttacatcatttaattaaatatggtgtgttttcatatacccactccacccccatcttatatagtatttgtgttttttgtttaaaaaaatctgttagtcaaaataggtatttattaatatgattaactctaatagctaatcatggtaaggccggttagttcttccataatcagacaaaattaaaatacctcattactgggttttgctgcattgctgtcctccttgggggtcctaggatctgtgggggtggctatggggtgttttaggcagttgggtttctcctcctcctcctcctcttcaatgtgcaggtgtggggtgccctctgacccatcgtggccacaccaccaggcgtctccttcctgaggttctggcggccctctctggatgcctgacacaatcccctcatagatgccctcatcttcctctccaatgaccggaaggggtacaggcaaggaacccacgctggtgcacgcagaggccacaaaattatcccctaggacttctggtgcctttttagggtctgagaagccccttctcatttttctcaactctgcaaagttgctttgagttgtcgttctgggatcctgaagaggctctgcatggtaaggctgggctgcagccgaggccacacccgcgtgagtggaaggtgattcggcaggtgcagtcgctggggacaatgggaggaggacagcaggttcctccttaatttccaggatggcgtcctctaggatggttggtttggcttggtcagctgacaaggttaaagcaccaagcttctccaattcacccaagaagttgtccaggaaacgaggtggtgttggggccaaagggtttgctggtagacatgaggctgtcagggacaaccagccctggccagttccctggagagctcctttatctgagccaggtgagactttgtgggtgggaggaggggctggttcactggaagccaacttggaaatgagcacggattatgaagttaagaaaaaataaactaagaaaataataataatgcatcaaaacatagcgatggagaaatgcagaaaagatgcggtggtgaatatgaaaataattttatgtttaacatagatttgaagacatttagaagatatctagatttgaaggtattttgctgaaatttaaatacataaaatcatttatgttaattagaaaagttacttcacaaatgaaactctactagttttggaaggggtcttaaatgtcaaacaagataaagatgatatagagattaccaggacagtaaaaccttgagagatttatttttatttatttttaattttttaaaaaattttttagagatggagtctcgctgtggcacccaggctggagtgcagtggtgtgatctcggctcactgcaacctctgcctcccaggttcaaacgattttcctgcttcatcctcccgagtagctgggactacaggcgcatgtcaccagtacagctaatttttatatttttagtagagacgggtttcaccatgttggccaggctggtcttgaactcctgacctcgtgacccacccacctcagcctcccaaagtgctggggttacaggtgtgagccaccgcgcctggcccttaagagatttaatgcttacttactttaaactatgttgaaaagatattacaggtttccagatactgacttagtagagtataaatgactccagagaaatgttaatgtagaatgaaaactaatagtgaagtcattttatttcctgaatgtgtgtagtgttctcttgtcctgcaggatagcccaatcttttaaacgctgacaattttctcacttatgtttgcaaggtgattacaacatatgaataaagtattttagatcattatatgttaacaaatttctaagtgaataagttctgaaaactatgtctcaaagacaggaacccatgatcagaatgaagctgagcttacataactacggcttcaaagttttaaaaaatccaaagtaaatatttacatagaaagctcatttgatgctaacgggagggaggacttctgcttcagctcccgttctctttcaaagcttgacatttatgtaaatcagaggaggtatgagttatgaagcttaatcttctgaagtaaaatatacttacttctacatacgtagtattactgatgtattttggatatagtaaatgaaacaatacatttgaaattttatgcaaaggtattaaaagtagttctgataaatatatacaccccatatgtacccataaaaattagaaattaaaaaatgtagttccagaagtgccacttactaacattggaatacgtttatctacccttaccggactagagaaaatgctacctgctatgtgcctaaaagccttgagaagggacctttcactttaggtctctccaggtagatgtctttgatttggaaagaaaaacatctccaaaaagattctggagatacactttccagctgattgtttaggataacactttacacagggaagcagccctcttgctcctggggacttagtgtgtgtgagtgggtgatgcatttcctacttaacttttgactcctgtgtcctatagtaggagtggggtattaattagatttatttagctttttttttttaagtcatcttatcgtgggatgacataaatatcacaaaactcatgtgagcatcttaatacaggattcaggacctgggctgcttagctgctgacacacagtgagactgcacgtgtggtttgcgcctaggtagacagccactcctgttaagtcctgtagatgctgagttttcaatgatataaaccactcaagtctcattcagcagtctacagaagttcccttactagctagagttctagtttataccccttgttacataacacagaagttttcatagttagatttggaaagtctgtgaaatatataataatttcagaccatcaggtttccactttcactttctgttatgccaggaatattatgtagatgagaaagaaagatcttgaattcccttgtcattactgccaccatcaccattgctatctgatgctgcgactacgctgtgccgtcaccaccacagtcaccgaaatacatgtcagcaggttaaactgcttagctttatgatggacttgcttataccgaaagccaaatgaagcatcctggtataactagatcacaaacctatacctataatacaaaacccatacaattattttgttttccaaaagcatcagaattggattctaatgcactaaaagcagaaatatcagaaataaaatcaacatacattttagtctcccctaagacaaagacagtatgtcaagaaatgtgatttaaatgtgtcaccagagtgatttataaattattaatgagttctctgtttgtaaatatcagttagaaaataggttctgtagcgtttagtatattttggatgttatcatttagaaatacattatatttatctttctaaaaatggttgtcacttccgggaagttttcttcattaagcctgtgacatcacagcatggattaccagttgggataaaaccattaagtatttcttcctaattatggacataagcttctcaacatattttttccccagcagtgagcaataaaaaactggttattagtgaaatttgtacatgcctctgtttaaaatctggtattactttaaaaacttgaaaatatattcaattacagttaaattgtattcacatcaaagatgaaaacattgggatcaaaaatattatattgccattaaatattatattaggacatatggaagaatttgttagatgtttaatgagcttttgtacatacatgcttttcttccttacaacattttatttgaaggtacagttgctttgaaatttctgtgatagttatttaaagatgactgaatggtggataagacaaatatatgcatgaagattcttatcttttctctttatcaatagaaaatactgaaggaaggatgctgatctgtaaatgctaaggtctggtaatgaagtaaatatacttaagaagattctggaaaactataaccaatcaagcaaacaaaattggatagtaccaaactcttccatatattatccatgaatacagggttgagggtaattatttgcaactgaaactcagtcttcaaagaggatcacaataaataaaatgccaagacttcagccttctaaaaaaaaatgcctctcttaagatggcagattcttagatcatttcctcatataaaatccttctcaggctcattttcaagaagtagtttaggtcactgggatgctatcttgaaacagttttttcatcggaacatgaagtgacttcacactttagtaacatctgatatgttgattttattttaccagctctcgatggtttagcttttcatgtcctagccttgatctcaattaaaataattaataaattaggcaacttaatacattttttgaatgttgagaagtacttaaaacattttggaagtcattggcaatttaaagttttattcctagaagttaatgagaaaaaagacccttacatgcctttcataaaaagaatataattcatcagaaaaataagaaaaaatttcacattgtgagtacagacaaatagcctttttacattcaccaattaaagaagcaaagcctcttttaaattacgtattgagaaagataatcatctttagcccgctcaagtgaaacagtagaactggcatataactgtcctaaaactgataaaacaaacttgaggacttataataaccgacaacattttcatttaaactaataaacatcttgacttatagactctaattaaaaatttttgctctagctcattttccatataaaaaacttgtatagatttgtcaacctaataacccggtgttcttgtgatatactattttgagatatacatagtattttgtgttgtgtatatttatatttcaaattataaatcacaattgtatatacatgtatgaatatatgattatatttatttatatgtaaagattatattatatacataaaatttacatatataaaaatgaagctttaggaaaaaattatttcagaaaacatttatgtacacaggagtacagatatatatcatacgagacttcatgatactctcgttttctctttctctttcgatattttaacttgaaaatgaaatgagcaaaattaatcattaaatctttatgccagcacctatttgagaaacactgacttatatttactgatgtggcactcacacatgtagaaacataatatgtaaatctctttctctgcaatagatatgatattctaatctaatatcctaaagtcacacaccgattatcttacttggagcttccaatattacattaacatgatagagtatgttcttaccttatttgagctcaagctgtgaatcctatcactagaatagctgtggggtattggagggtcagggtagtcctcagcaccttttgtgttcttcttgacgacctccacataggaaacagggaagatgccttgtctgttggttcctgggattttaccttcataccagttttgatcaactcttttaagaagaataactctatctccctgttatgaatatgagaaaaatgcattagaaacagagatagaataacatgaaaatataattgtcaatgttttctatgaaaaaataggtttccatttgggcaggttttataccttcagtttttgtttaatcaggggagggcaagtaaggtactagtgcttactagaaaaatacacatgatcaacatatatgtaattgaaatgtccattcaggccatcagaatcttccctaaggatgcctgattaatgtgaacgggtttatacttgtttatgctggtattgtgtgaaattatttgtctaagttatttcaaaaagcagaatagtgtaaaaggtaatgtctcaatgacaataggattattttatctctggcaggttcagtgcattggccttctgtaggaagagcttcagaaagtgcaccatagcttgctgtgagggtctgtctgaaatgggttacagaaaacacctctagaagggagaacatcgaatggtacaccgttttctttttttatttctattttttttttttttttgagagggaatctcactctgtcacccgggctggagtgcagtggtgtgatcatggctcactgcaacccgcacctcctgggtttaagaattctcttgcctcagcctaccaagtagctgggattacaggcgcccgccaccaggcccggctaattttttgtattttagcagagataggggtttcaccatgttggtcaggctgatctccaactcctgacctcaagtgatctgaccgcctcggcctcccaaagtgctgggattgcaggcatgagccactgtgcccggccccttttcttctttaatctacatgcgctaagtagtgacagagtgaactaaagggatgggggaaagagagcgccctagaatatcaatagctgtgacaagactggcattcccctggtcttcaccctgacaatggaaacccagcatccatctgagtagttggtgaccattccatacttgtcattaaagatttgaatagaacccttggctttcacaatgatagaactttctagaatcacttccacctgccatgaccgagccagtgctgcagaactcagtttaaactttaactcaaaactacacgtagcctagaagtaggcaggcaagttgatgctaccgggcaaaaactgcagctgcattcagcaggtgatacagaagctcgggcagcggcacctgatggtgtgatggagctgaaacagtcattaatctcagcccaacagggcacccttcttcaggtgctacccaagaagaacttcgaccttgagtagcacttggaagttctctttgtgttgaaacgctggatggttgattttgtgtgcttcaccaccgctgagcagaacatactcaagaaaagtcagtctcaggctggatgcaatcgctcacgcctgtaatcccagcactttgggaggccaaggcgggcggatcatgaggtcaggagttcgagaccagcctggccaacatagtgaaaccccatctctactaaaaatacaaaaattagccgggtgtggtggcgggcacctgtagtcccagctaatcgggaggctgaggtgggagaatcgcttgaacctgggaggcagaggttgcagtgagctgagagcacacattgcactccagcctgggtgacagagtgacactccatctcaaaaaaaaaaaaaaaaaaaaaaagtcagtctccccaaatctgaaaattgcaccgattttctagtataccaagaacaggtagttgctaggctgttgtgtgagctgtaagaggcattggtgaagcctttctgtagaacatggaacaggagacagagttcatgtaatgctctgtggttctcatgctaggtggggcagcccagaggataggaaagaaggaatcggctgatgatgcagaattaagactgatgggagagaatgagacaaggttctgccaggaccagaacaaaccaggactgtggtattgctcttcatcgcacctggctaaggatttcactagtaggtgtgggaggtcctagagccactctaaatattactacctcgcctgtgttgtgtgcagaggcagttacctcaaacaaatatatgtcatatttagaaagcaataagaataattcatttatcattctcaattatgtaaactagcaggttaaaagaggtttttgattgtttttttgtgtttttttttttttttttttttttgagatggaatctcgctcacctgccttggcctcccaaagtgctgggattacaggcgtgagccaccatgcccggcctcgaggcttttgatattattaagaagagatactaggattggatgggctgctagagaaatttgggtcaattatgaggcccaaagaaggatgatccagggaagagcactgcagagatggctcttaaagcggctcccccaagaggaaggatcttctttacctaggaccattcctagattccaagatagaggaagataaggattggaatatcttgtttttaaaagactgaaaaataaggcagcaaaacaacatattttgaagtgtatcaaactgctttttccttttgtgctcccgaatgtataagtccttgattttcagccccatgcccggcttcccagactaagccacagagggagaagcctggtatcccacggggaactcctctaaaaggacacagggaccagcagggaaccgtgactctgggctgccttaaagagtcctttgtagaaaatagggtaaacataaaaatgtctaaagaaaaagataacctattttagttttgaaaatatacagccttttcaaacccactgaagaacaaacaaacaaaaacaaacaaacaaaaaaccagctgggctacctttctcagtgacagctccacatttgtgtctgcgttgaagttgtatttggctatagcttctccgatttctccgggctgggctggcggaggtggtcttgcaggctgtgctttctcaggaggtgtgagtttctatgaaggaaatagtcatttattctcaaatctgcggtgacctttgaaaccaccgccatccaagagagaaagggagaggacctacctctacgtatgagatcgggaagatgcccactctcccgtggtgttctccctcataccaattttgatcaattttcctgaggatgtagacagtatctcctttcttaaatgacaactccctggaagagacacgttgacatggtctttttgtgatgtacagcaataattctcaagatcaacaccctcgctagatctgcatttgtttggcaaatatacttacaatattaaaaaatccaattgatattgagtccgattagataagaatgatccttgcaaattcttagaatgcacttaaaacattataactttagaaatgatttcaaacagagtaagtataaacattccattggatataaatcacagacagattaataagaagtttaaaggaggggacagactcttgctactttaccattagttcagagaagaggcattttgaagcttggaaaaatgatggaatagttctgcactgattttttttttttttgtcctgaagctagttggctagttagttactagccccccagccccttttgatgtactgaagcttacatgaaggaaaacaaatatcatgtagcctcagaatagaagtgccaacaccagaacaaattttatttgtggatctttgaagttggttgacaggtattttaatagaatatcttgataaggaatttattttgtgtaacagaaaagatcttacacttttaattttcagtggggcaagaagaatgtgttttaagtgcaaagacatatgccaatgcttgcctttctatcttttatttacaaaaaataaaaatatttttaagacactatatttttcaattttggctgtttctaagaaaattgtaggtatatttgatttgggtatttataattttaagttataatgacattatgcattttgaataattcacacctaaacttatcaccttcactacatcaatttttcctggcttaatcacccaggtgattaggttggttcattattttgcctccgcaattattcttggatggagggcgattaatttgtatcttctcccaagagcctcattttgcaatacatctgccctcccactctggaatcttctgcattgttttgttcagaattttcattttttaatctttttttaaaaaattttggttcagaattttcagttggatcatttattagtataggccgtttgatggagagagatttatacctgatggagaacacttctcattgattaaaagaattaatcgaaaaaatggtggtatattaaaagaatgatcacacatttagaagtgctaaaatcttcacaattgaaaatgtgttaaattttcagtaaccctaaaaacaaagaagattcatggagctttacattcaaatacagtgcttccttcttttgtgcaaatgcctaatgtaaaaaacagaaaacaaagcaaagcaagatatttaatgttcacaacacaacagtttcatttgtactaggtatgttttgtttctggaaatgagactagctttttaaaatataatatgaacatatgaatcagaggcaaccaatttttcaaagctatgaaaaagactcttttgtatttgtataggttgcatttaaaattttgaagtccttaagacacaggaaagtcttactcttaagttttcaaaactgtgtccctctcatctcagacctagaattttaaagtcccatttgcttttttcccctcacttttatttttatttgtttttgagatggagtcttgctctgtcacccaggctggagtgcagtggtgtgatcttggctcactgcaaccttcacctcccaggttcaagtgattctcccacctcagcctcctgagtagctgggattacaggcacccaccaccacccctggctaatttttgtattttcagtagagacggggtttcaccatgttggccaggctggtctcgaacttctgacctcgagtgatccatctgccttggcctcccaaagtgctgggattacaggcatgagccaccgtgcccagctgctttttaaaattaagacttctcagaagacctcgtgagccttgggtggacacccttcctacttcacatcccctgccattcctcaggtttttatatatttaagaaagctatggattgatttttacaaagaagaaatgaaacgtgtgctccgtaacattattttataaaactgatatgcattgtacaaattgtcacaccatatccacagaacagtagttaggaccggagtacagtagaaacaaagcatcttatttctctaatttgaaaaaaaaagatgtaagcttttcttcaggccagatttaagccatgttcaacatcttaatttctaaacaggatttttcttatctagttcatttcctatctcagcagcattaccaaattctgagtgatttatttatatatgtcttctgccagagacagtttctagagctattaactcatattatatgcatttttatgagtaaattattttggttattatatatatatatattcagtgtaaacaacatataataatttaatgacaatttacaatgaattcaatatctgtcttgaattctactggagaacaaagtttcttaaaggtctgtgcacataggccacaaaaaatctgggcaacaccctcttatatataagtctgcttatgtgcttccgcaaccacatgcctatctgctgagcaaagaataaaggcaaaagaaatattgcaattcaggatggtgaaaacaccgacaccaaaagaccaaaggagaaaactttgctcagaatctctgagctttgcaggctgaggatggagacttcaatacaggaatctttgtactaagttctagtcatcaaccccacaaactatgcttggaatatttggataaataaatgttatcaaattcccccagctagtgttaattactccccaatactttatttatttacttattcattcttttttttgagacagggtcctgctctgttgcccaggctagagtgcagtggcgcaacctcagcttatggcagcgtctacctcccggtgaagcgatccttttgcctcagcctcctgagtagctgggactatacaggtgtatgcccccatgcctagctaatttttgtattttttgtagagacatggttttgccatgttgcccaggctggttttgaactcctgggctcaagccatctgcctgccttggcctcccaaagtgctgggattacaggcatgagccactgtgcctggcccccaatacttcattaattcattattgacacaaaattctaaaaacaaatattcctaaattctttttgtttttcctatcctttagaattcattgtgttctacctaacatgtttaatgtaatttaaaactcagtaattctcaactaaacttaaaataaaaggtaattctgaaggaaccatttaattagagtagattgctgcattgggaattagacctcatttgtaacagatcctactgcaatgcttatctcttaaagcattactaacatttaaaaccaccttaaatcatatgatgagtatttatcttacttacttagatgtctgagccttaaaatcataaacagcttttgcaggcaatttctgaaaaggaagataaacaattagcactaatttaaaatttgaattttctacaagaaagtagtttaatgtgccttaaagaaaaaggaaacctcagggaatcatcaaacatatgtaatgttaatcctgtaagcaatttataaataagtccattcattcttcatttagatatttaagctataataggaatataatagaaggcttattcaccatcatatttaatcttaggaactaaggtagattaatgttataatgagagaataaaatgcctgcagaggtttgcatcctaggcatcattttggctgttacaaaggctcttcctaggataaatgtggagggtcaatggctctatgttctatggagattgacacagctccctctgaatcataataaaaggaccagatgtcataaaagaagtaatcattcccttcattagacacttattaacatattagcaaaaaatattagctcaattatcactgggaggctggttagtgggcaaaagtataggtgtgatcatcttgcattccctagagggctcaggaatccttcaacactctgtccaccagccactcgtcttttagttgtgatgtgatgtgacacgtgcccatcctcaaactctgggggccacagatctccctgaggtaccctgtaccctatagctagctaggccagctcttccttcctcaccaaccaacaatcccttcactccattcttttcccccatgactctggtgaactttaggaatcctggaccatttctaacttctttggggatcccacaggctctggactacatcagacgcctataagatcctctggagcggctaccagtccaagtccagcttttagtttccatccagccgtcatggctccaaggcagtttgagcaagaactctagccccggctcagggccctggacagagttcagttggtgggtggttcccaggggcagtatcccgagaactgggctggttaaaagctctttttagggatcctctccaataaaaggaagccagcaaaaatgatttctgtaggctctgtattgatttacaacacagttgacatcaggctttctcctggaccagcgggccaagaaattgtagaggaaacctattgcctccacgaggtgccctaactcaggacacttttaggtcataatggttaagttcatgggcatcaggtcaagactcggagaagcctcatggccaaaactgggccaccactagggaagacccacagctagggtcagggtgtggactgcttctagggtcagagttgctatgctcaggccccaaggaaaattgtttctagtttctcagtattttcacatttcctgtccgagttcgttactggtttgggataatttttggctggtaagtgctgtatcaagtgtgttgctgtgaaagactccaatgctattaaattaactacctctttttctggagttcctcttctttcccttggtgcacttctccccatgtcagtcaaagtggatgagtaacttctaggggactcacggtctattggaaagaacagggccagtcatggtgagtatccacttaattacaagccaacctgttccgccattttccctggtggccactacttttttccccaaatttggagagacaccgttatcgaacacatgggcataaaactcatagttcattacaaagttgtgaaataagacacaaaacaagagcatttcaaaaggaaaaatatctgaggttgcagaattataattgtctatataaatatgattactacattgctgattaattatattgccacacccagtaagacaatttatagttagagggatttttcatataaattttttccaaagctttctgtttctatgcctttgcttcttatttataattactattataagatttacagaggatggagaatttgaaaatagcaacaatttgtagaaaaagaaacattttgtggagtaatttaagactgtagtaatgaaaaagaaagagataaaaccaaagaaagtatgaggatgacaggagggtggtgatgaacattctccttctgccttactctcccctcttcgctcttcctctgtttttaaatacttattgaatctcaagatgccatgctgtttatctacgaccttcctttgtgcccagatgataaacaccttatcagaaagcaaagaaacaaagagatattgtttcttcttactccaagcaaaaaagggataaacagaaagcatcatgtcagttgccaaattgcttatgaaatattgaattatttttgttcatcttaaagcaaagcataaataatcacattacaaaattttgattgcatgtagttcttaatagtatcttataccttttgcacttacgtgacttacatatggagatgtaactagacattaaatgtattccagtagtctatgttatagaattttatcagtacaactgggtcaatatttgtcaattctttcttttatcccttaaatatatctagttatccagactaacaagaagcattaaaaataaaatttattttatccatctatgaaagaatttaaagtgctgattcataataagaaaacattgttttaggattttgactactttgatgatgtaaattctaagttaatatacttttatgatcatagggcctcataatgatcataaattttaaattactttttctaacccagggaatataagctatttttcacttgggtgaaacacaattggaaagtaaatattttactaaaaaacaaaatacttttaaatgcatttcaaagcccttccaagttacgtttcaaaaatgtactcctatctgcacataaaattgagagatggttatattaggatattaaaagcctggagaaggtagctaatttattaaaaaatgagattctgacacatttcaattagtgaaaattttgaattgtagaaattgattttttaaattctaatttattattttgaagcatgttgcttcagcctaagggtaggcaaagataaacgtaagtgtatagtgtagcaaaagtgaaagcaaacataaagactaagtagatttgtgcaagttaattaacaatcgagccatatttgacactagtatgaactgtgaattatgtctttttttttgtctgagattatattttatactataaattctgaattattaggggtttgaatctcttttctgttatctactctctgtgtgaccttggacgaatttcctttcctctctgggcccaacttccaaaattgaaaatggcttttgaaataacacccatttcataggcctatgccagttttattagataatgtatgtaaagcactctgtagtgtctggtgcatagaagtttctctgttgaccaactttcagcccggaatgttcattccagcctcttaaaatttacgtagtgaacagatgtgctgtaagaattaatgaaaataattggtcacaaatattaaaacaccctgggctgtaagttatataaatctcaaaaatagtcctctgcctttcaattgctatttattcttgtgttgccacttcaaagttatctatgaaaatagagtttagagtcactgttagcctgaatagtgtaattcaaatttcaatacaggactgttttagcagaaagagaaagtgaatgaattaagtaatggaaaagagaaaatgaatacactaaatggtggaaatgggacttttatatatatagcttaaagatacattcacaaaaattttatcaccattgtgtccttgaaatggagaaagctattaaacaaaccctaatttctttgtgtccatcaattactaatcacatatttcagttttgcttcttgaatgttttgatatagtatcttctatatagaatgtgacaaattatttattaactgaatgaatataaagttttaacgttaatataaacatttttaaaaggctatttgtggaactataggttttgattcatgtcacaacgtaatttattgtctcaatgtgagtagtggttgtttcaaccctaatgctgagctacaaaatggccttccctctcgttttcgaaagagtaaatttttgtgaattgatgatcactttaagccacacatcaagtccaaatatcacatgggcaaatgagaaatattcagtaagacatatttgcacaacaagtttttgcttcacaacacataacgacgccaaatggtctcccagctcgggagtgatgagatgttggaatggaaaatgaaagagctggagggtgggtctctgaaccacaaggaaaaagaaagaaaagctcatccaccttggagtgcaccgccacggtcttggtggtggcagctgctgttggctgtgtccacgtcttggaaagaggcactgcggggcattctcccgcagtcattctggtagggtggacaatgaatagcaccatcgggaggcagtgggtggagaggctggtgcagggggctcctcctcagcgctctcagggatgagttcctctcgggaacatctggcagcagctcactgatgaggcggtgcaggatgctgttgtccggcaagctcccccttttcttttcagctttaatttggtcacagatgtctttaagggcagagtccagagcctcaaacacagatgctttacattttgccttttcagtctgtttcttaggagccgaattttttttcctccggaaaggcacaggactgactagaaaagcaagtttagaaaggccagggtccatttcttgccttctgggctcctcggtgttttcgtgtctggctctttcgtgttttaacattgtggtaaatcgagtgtaggaggccgggcacctgcctttgcaggagctgatgaggtggcggtggtggtggtggtggtgatggtggtggtggtggctggatccgtaaaagctttcggaggatgtgaaggaaaagtgatcaaagtcactttcactgcagaaggatgacccctctaggtgaatgtagtcactgtggtcggacacaaccccgtcctggtcgctgtcggaaaactccacgtgtgctcggggctgctcatcgctggtgacttcaatgtgaatgggcaccagggcgttagactggcagcctcgccggccccgagcgggggggccgctttgattttcttcctccagcaaatactcaatggaaaaccgcctcttgggacataggccattttgcggtggttctagggttacgggagacagcatgtcatcccctaaatttggcatggatttggacttctggatcagcttttcgaattcggagatgcgtgtgggcaccatgtcccggggcacctcctccgtggagcactggctccaggcgcgcagcaggtccttgtgctgctgctcgctctcgtactgcagaatcctggacttcacggagcagatcacctcggagttcatcaggtccttgcggttgatgcggtgcattttcttgtacatcttcaggaaccccggggcgttgcgggctgacctgtgtctgatccttgatctgccgttactgcgaacctccgggacgtagggggacccccacgccatggggcagctctccttggagtcctcctcacataacagggagcccatgctttccgacttgactttcgggtccgggaagctatcgcagtcgtcgtttaggagatcgtcacagctccgggatttgattttgggagagacggtttcttccgtgctgctccagatttctgcgttttgccgggccatttgccagccgttcttgaaactaatggctcttggtgagtcccgagggacatccaagtgctgtctgtaagtgctacagtaatctaactcactggaggggttgccgttgagccctgagtaactgcaaagggatggacatattttgctatcatccccaccttttaatccagagcagcgtggtagaagagagacatttggagaagttaaaaggttcacaaagagaggagagcatgtcagtaaagcatcagacagcatagcaaggagaaagcagttagtgtgttttaatctaggtgctgattgttcacacatggagcttcaactctagagaagaaggtctaattctaaagcgagctaatactttttcagtgaatgtagctttgcagagagagttgacaaaactgtgtataagaagcaaccgacgtaagcaaatacacctactcctactgcataattcatacacctttctgacaatattgtttgccaaaacacaatagtgctgcttcagctgatagcatgatctggtagtgaaggtttaacaattagtgtcaaaagtgttatacccttacgcaatttaatagggccggaatttgagcctcatttgattcgtaatgatacataggtgaagaagggtttatacatttacatcgaattaatactctcatgactatatcaaataattttttgtgggttttagattttaaaagctataaggcaaagtattctccaaaattgcaaaatcaaaatgctgtgaactattgctgctaacatttttctagaaaaaaatagctaaagctctttaaacaaacgaatttacctcttaaattgctctacctttaaccttttattaggtacaaaattctcataggaaaactgaatataatgcaaaactttcatcagaggtgcatataccatgctttttttctcggaagagttctttgaaaaatcatttgcaatttgataatagagatctacatttggcctcaattttgaatagctatggaaatgttcttttgctttgctgagtcaactaataaatgaggagccaaattatatctaataggacattttcttcctagaaataaaatctaatggaggaaaatatctctattcaatacttataccttacaatgttctctaaattctttaaaagtagataagcacattaggtagatctgtactgtctgggaaaggaagttgatttaacattccctgtgatgaaacaaatatctacatttatcagaacccttttaacttttggctagtatccaagaataataggtcaatggcatttcatgacctacttgttaccttaagatattcatttgaataagtgagttgaatctgataaggcatctctgctcctcagaggaaagatgtgatggatggggctcacacgccctgaaccatcagctgatatcacagctttacaaggccttaaaagggctaggcatccacctactcagagtccaatcatcacgaccagaataccttttgcacacaaatcagctaccacttttaactaccatgtggcaatggttttagtgactatagttgataggtgtagctgaattggtctggttttatagaaacttacattagagctcaatttctttacacatttcaaaatctctttctcttctctttcaatcccaagatattagaggagattgtggggtcccacatttggtagagccctagctccctgtaggggctggttcaatcctcactctccatctcagaaatattcctgtcctcaaggaataccactaaatggtcttccagaaaccagaaggagtgacttctttcaacagtgagctccctacacttgcagagaggagacgggccatccagaaaaaaaggcttggtgattcctcagtgatatcattatggtttgggaccaattagtcctgactgtgagctgctgtgaattgaccactgtgttacatggcaggaggtggatgctccactgttcatgtgaaggtggcccaaaatatacagcaaatggctaaagaaattaataggtcggatttttttaaaatctagaattgaataattttttaaaaccctccaaaccaatgtatattttagccaacaatttgctctgttgctgcttgtaatttttatcctataaatttgactaatttgctagttgtagaaacattagaaaattttgactatatgtcaatgtttacaaaatacatcttttagtagcctgatgatacattatttgatactttcaatttgtttagaaagggatctatttgggggaaaaaagcattagcagatgctagtcagagttctttaagcaacctaagtggctcgccagcttgagtcagtctgggtgggaagaaggctattgttctaaaactatattttattccagacactgtaggtgagagctggcacatgccactatcactgggccagctttcacacagtgctctaggctaaaacgtaaactagtaaattgttgtgttttcatttactatgctcaccttttgctcttgatggggaagaaggagaagagctagtgaaagactttgtaagagtggtgcttgatcctgggaggtccactcggcctgggctagtcctgctcgcactttgatctcccaagccccgtggtggacccactgcaggctcgctcttcctccgcttcctgaagtcactggccatgcttgcagaactgaaagaaggaatcagatctgtttgattggcactggaggaggttcgggtgtgcaccagaaaaaccggtggaacgtgctagtgacaatggcgtaactcctaaacctctatccccaaaactgcattgctaggaactcatcccttgatgttcaacatgatttctctagaaggatcttttaaaaaatgaatagaccttattatttattttgagatggcttctggctctgtcacccaggctggaagcgcagtggtgcaatcacagctcactgcagccccaaactcctgggctcaagggatactcccgcctcaacctcctgagtagctgggaccacaggtgggtgccacctcacctggctaatttttttaaatttgttatttatgtagagacagagtctcactatgttgcccaggctggtctcaaacccctgagctcaagtaatcctcaagcctcagtctcctgaagtgttgggattacaggcgtgaaccactgtgcccggacaactaaatttttttagggcagttttaggcttacagaaataatgactggaaagtgtagagagtttccttatagtccctttcctcttgcacagtttcccttatcatttacatattcttttggtgggtacattgtcacaattgatgaatctttcctgatgcgtcgtcaccccaagtccatagtttacatttgagttcatgttttgtcttaaacattttaggggttttgagaaatgtataatgatgtgtgtccatcattaatgtgtcaatcatataaaatagtcttcccgccataaaaagcttctgtcctccagcttttcatccctcccttcctcccgctcatcctggcacccactgatctttccacacggcctccacagtttcgccttttcaccatgcccagttgatatcatgcagaatgtggcctctcaggttggcttcctgcactcggtgatacacttttaaggctcctccatgtgttttttgtcacttgatagctcatttctttgtattgctgagtcacattctattattacatggatgcgccacagtttatgtatccattcacctattgaaggacatcttggttgcttccaacttctagcaattataaataatgctcctaagaaaaccacctgctggtttttgtgtgaacctaagtttttaaacatctttgaacgtcaaaattctcctatagtgtaatatgttgattgagaattcagtgctataatttgtatcttgtatcttttctctataaagcggagttctaacaacatgaatatatccagaggggcataccaaatacaggaaataactgaaaaaaaaaaaagacatcaagagaggaaaatctctctcacctcaagggttgcctgcagcttgtcctatcatctctatcatcttagctttagaagatgttatattggaattccaacattttttatttaaataatgaatgaaggctgagtatgatggctcacgtctgtaatcaagtactttgggaggccaaggctggaggatggctcaaggtcaggagtttgagaccagcctggacaacctagtgagactctgtctctacagaaaataaaaaagttagccagttgtgtcatgtgcctgtagtcccagctattcaggaggctgaggtgggaggatagcttgagcacaggagtttgaggctgcagtgagccatgattgcaccactgcactccagcttgggcaacagagcaagaccctgtctcatcagtcagtcaatcaatcagtaccagtaatctggtcagcaaattaactattaaagattccttcccctcagttgcataaaatactgtcaatagtctagaacagcagggagtttctgtcatggttttgagtttgagtacagtatcatttaagaccaatgttaatgaatgaagccacatatggcacagcacactgtgcatgaaatcactggattcttagacaagacttgtgtagacaacagtgataatagcaacagcagcaaccccagctcctatggagcccagcagaatgctatgtgctttctttatgtttttgtcttatttagcccacacagcaaaccgatgaggtatatgctgttatctcagttttacaaatggtaaagtgaatacatgtgtctgggatgtacggaagcaagcggagaggcagacctcagaactggtttgtcctcttctgaagaggatgcatctcctagacctgtttttgctgggactgtcctgtcatgtgagggtctgtgtgtctttacggcaatctgtagattagattaaaactctaaaattcaaatattttaggtgcatagatagaggcagaagataaaaaggaggggttccagagttcctttctcagggatgttattgcagttggatggcactcagaaacccaatttatgattgacccaattcacaaagaaatctacatagaagggtaaattaatgctactagataaatatttgttattgatgttacaatatggctgggagtttgtattattcaatattactattgaactatgtctgaatatgtctgaattttgtgatttgtttttttttttttttttagactgagtcttgctgtgttgccaggctggagtgcagtggtgcaatctcgactcactgcaacctccaccctcccaggctcaagcgattcttctgcctcagcctcctgaatagctgtgactagaggggcatgccaccatgtctagctaatttttgtagttttagtagtgatggggtttcaccatgatggccaggatggtctcaatctcttgacctcatgatcttcccccctcagcctcccaactgctgggattacaggcatgagccaccgtgcctggccatgaattttgtaatattttttaaaaagtgtgatatttaaagctaatggaacttacttcaggcgaactctgagggaagttaggcctagcggtgacaagctatcttgcctcaatttcttttttttctctctccttgccaactgtgtaaacttggtaagttactaagcctaggtgtcactttcctcagagataaagtggggacaatagtatttaaccatagtgttttcttaggattgaatatgttttgtacttatgcctcatttattggtagtattaataacagtatttctgatttgtgtggtcaaagtatgattaacaaatacgtgtataacactttttaatctataatttttttcaaatatattattataagggccatttaacaacattgaaaattagttacttataattcccatctaaagaaaagaaaactgggtataggggactaagggaagagaaggatttctcagtctgtgaaggaatttataattagttcactaattttttagaaattcttgaaatgatcatataaaatgatgctgaaacaaaataaaacaacttcatgaggcatggtacttcaaataaaaatgagtgatacatgatactcattactacttcactgaataattttattgttgaaaaagaaaccactggtatagaatattctgctacaacataataagattcttacctcatgggtctttccaggcttctgtctatagaggactgatacaaggaggcctgttaagataggataatagtaccatgaaaaattttaccgtggcaaaattttgttcacttgtcaacattaaattaggtatcctaaaaagaatattataaaaattgaggttgaaagtaccattcattatgactataaaaatgtcttcccaaagagagatcatgcgacctgatttctacttgggacctatctgctttcccttctgatataatgcattgcagttctctgtgtagctcaaattatccacaacccaagcattgcatggggggaaattaataatattttctcagggacactgaaataagagctaaagttatcctacagcctgaactgcagaatcttacctgttgactgtaaatagaaatttcctacagaaaggaatggtttgatgttttaaaaaatttgtagtcatcattcaatccttataaaacatcacattttaaagtttttgttattgttgttaccaagtattgtcttcagaatgtaacacataagcagaacttaagacaccattcatctgtcaacatagacatgacgtttaaataaaacccacagagtttgacttgaagaaactaaataaagtacctggtacttcaatcaggtaaatagttatacttttacaattaggtgagttcagggctagtttaaaataaatgagctaatgaagcaaaatataacttttttaaagtgcgcttttaaatttttccttcattctgaataatacactgaaatagatagtaagcaaaaatgataatatgaattttttattttccatggcatctgctgggataattgctaaaatatctaaaaggcaagagaggacactgagctatcaagtgtttgaggtgacactgtggtatgatgtccagaaagcacagggagatggctgggtgcagtggctcatgcctgtaatcccagcactttgggaggccaacgcgggtggatcacctgtggtcaggagttcaagatcagcctgaccaacgtggtgaaaccctgtctctactaaatatgaaaaacgagccaggcatggtgacacattcctgttatcccagccacgcaggaggctgaggcaggagaattgcttgaatctgggaggcagaggttgcagcgagtcgagatggcgccactgcactccagcctgggccatgagagtgaaaccccatctcaaaaaaacaaaaacaaaaaacaacaaaaaaacaaaacaaaacaaaacaaaacaaaagtataaagaaagtatagggagatgtataccaagtatagatagttttgcctttggtcatatttgatgatcaattcatcacagataaaatttggtttgatgaagaactggaattctagtttaaaaacatttgtctgtatgaaagcttaaaaatgtcagccagaaaggcaaggtttgacaaatgttgtcttaagttgccatcatctagaaacattttatcagagtattaaacatctacttagtggaaatcaaatctcactttacaaactatttctataactcagttttctattaattggtaaattagcaccaattaatcaattaaaacaatacaattttgcaattctgtatgtatatcagtcttacaaggtcccttttgcataacttacgcttctattaactaatattttaatttaattctatcttactaaatgaaaatggaatcttgtctagaaacaaaagcatctctgcatgagaatattcccatcctccttttagacagaaaaagtggattgtaatatttttagttcctagaaaatatttagatttctaggttctcaacaaatataaaatcaggagaaaagtttggtttgctagtctgatatgtgtacatggttattttaatttgctgagctctgaatcagacactgggaaggtagaaaaatagatactaaatatgaaagaaagcaaacaagtaaaataaaatcagatcgttatattacaattaagaaatattaattctactcgtttgcagaagagcgacactgaagagcctgagagcatcggcgtctgtgcagatcacggctttcgtgggacaccctcacacacagctgatcaccaaaaagtgtgaagttcacaacactcttagaacaaccctacagtgatcagaaaatttgaattgtcaacttataatgagcctaaacaatattgtaatgtgaaataaaacatagtgtaagaactgattgtgttttagggttaggctaagaaactactatttctccttgtactggtttctacattcaaaataaatgaaaaccagttttgcggtttcatgtacactcagagaaagttcagtattaaattgtaagataagagtaaaaaatctagattgatgactgagagaaaaacttgtacaataattgtaagaagtgtactcatcccaaaatgaaaattatctccagaaaagaggttacaaattttaccagttatgatctactatttacatattaccattattttaacacacttagaaggtcaatttagtgaagtacagatactgaatcactctttctgttaagtagctatgagattaaattttgcttaaatatccgtaactgttcttcattaatgccagttttccagttatggattaaaatctatgttattcatggtatataccaggcagttgataaacggtagctaaggtaatgtctaatcaattacatttgtttttaccagaaatgtttaataacaaaaggttattaaagacaaaatccagaaccttaagagaatatattttcttacattctgaaaaactataatgtgaaattaataacatagttaacatatgctattagaatcatacagcaccccctctcaatcccagagataactggcaaatagatcaactactggcaaagtgctttttatgtgttgtttttttttttttgccactaccatcacataatagaatgcatagagttaagtttctactatttttatgcccaagaattattgtgtaatattaattaacagaactcttttcacaggaattcaatagttaacaagaaataatattaagtaagtaatttgtttttaaaagatttatcctctaaatatatatcttggaagtgctgaaaagtgtgatataaaggaaatagcacagaaatgaaggttaagagagatatatttttttttctgccactatcttaccatgtgattttggacttatttcttaaaattattgcactctacttttttttttaactgaaaaatgagtgaattggacatgatgcactctaaattccatttcagttatctatgaaccaactaccttaaaaacaccctagaaatatctgagaaaaatatctgaccacattgaatttcaaaataaattcttgggttgttcatatgttgaaataagactctttctgcagatattaaggtaacataacatacagaatataaccccttgttttatttgattttcttcagattacatgcctgcctgcctggctataaaatgtaagcctttagaaataactgaattcaataacccagaatgttcctgattactctattttaccttttatttaatatataaatattttgatcacttctcagttttaacacacactctgatgtttaccacagggtaaataatttgaaattgcaagttgagacgctagaaatttgcatattttcttgagactctatacctgcaattccagtggtcaccactatgtgtcagtagtacctcctacaacacaacggttctactggttgtgtttcccagttgcacatatttaagacttttaatgaaaataagatatttattgtgttatagtattcacttaagaccacagagcaactaatgtgcaaaaaacagtttatttacttcgttcccatgctagttgcttctaagagttccttgcaaggaggcttttatatagctgatggctagcaaaacagtgccatttctgcttgtgtcttctaatgagtcatttatccactttctaaagtaattttctgcttttctttgcagagagcaggttaacaagcttttgactctgaatcatttctgcctgtatcattctctctttcaaataaaactctgattcaaataaaaatatacattggctgccataaatttttcacctagttgattattataggctcttaagtagagattgcaaacgcatttcattttatatgccaatgataatttgttatagtggctgcctggattacagtgttgaaaaggagtagtcatgtctgtcatgggtatgaaactgggaagttgtgatacacaatttccaggtatttgccagccctattcttgactgataatacaatccgtaagttgtatttaggaaaatgaaagaacaaaaataaattttagaaatatatgggacataggcatctgattatccacactccaagcattataatagaatggttctaagaagccttcttgtagtattttactctgtctcataaaaagaggtggttaatatatgcactaagactaatacttttgatttttaattttcacgctgctgaataccagaactacatagaatagtataactagcagttgtggttggaatgattcttcacccagagtccagagatagccaacaactctggtataattaatgtccaggcaatgatactggatgcaacataatgatgcaaagatagatattttttcaaaaatagcttagacattacagagaattgtaaaacacagatgtgcagaatcacagtcacagcctctaagggagatatctgaaaaagagagaataacgtgtttttacctcattgaaaacaccagaagaatgatcttgaacatagtccagaggctttttaggaggctgggtgtagacgcaccacagaagcagaagtgtagggatggaatggaggagagtcaatggcagcaaggaatgaacatgtggaaaaggtgacaacagttagaaattgagtgttgacagcaccagctacacaaacagaatgacatgaatggagcaaaatgggggcagctgggaggaagtgtgcaacgtctgcaaatattctcaagcactgggaaaattggctagtgttcaattagtatatttataaattcattttgtcaaatttcattagcactcctagtctctggccacagaggaatgcaaggtaaattaaagaaacattaaaggagcaagtggatagcatgctggtgagtttccatgtgtgactgaaaatgattatggaaaatgctgataacttaggctcagtacagaatagtccctataagctttctttttgaattattttattttattttattttatttttttgagacagggtttcactctgtcacccaggctggagtgtagtgacaccgtctcagctcactgcaatctctgccaccagggttcaagtgattctcccacctcagccccctgagtagctgggattacaggcgtacgccaccatgcccagctaatttttgtatttttagtagagaaggggtttcaccatgttggccaggctggtctcgaacccctgacctcaagtgttccgtctgcctcagcctcccaaaatgctgggattacaggtgtgagtcaccacgcctggccgtccctataaactttctaaccaacagcaacaatacatataaaataaagctagagaatgtttttccttgaaataaaatacatttacattcacactaagatacaaatgagaaaaaatgagagaaaacattcctcctatgagataataaccctaagaaaaatcctttggtttatattcgtttacagtcacttttgattcagttcaataagctaccttgagtctaaccaagtctcctttgcagtttaatggacaaaagagactaccatcaccaatcagtaaaccatatatggtccatatgcaagtatataaatcagcatatggtatagaaatggttatatcctgatttctaaaaaaactatcagtgtaattggtaggttatttaagagtctaaaacgcataaaaacgtgtgtaactgacacacatcaaatgcactgctgttggtggatacagttcctaatcagggaagttgttaactgaacctccagttgactattttttttttttttttttgagatggagtctcactctgtcgcccaggctggagtgcagtggcgtgatcccagctcactgcaatctccgcctcccaggttcaagcgattctcctgcctcggtctcccaagtagctgggactacaggcacccgccaccatgcccaactaatgtttgtatttttagcagagacggggtttcaccatgttggccagaatggtctcaatctgttgatttcgtgatccgcctgcctcggcctcccaaagtgctgggattacaggtgtgagccaccgtgctcggcctcaagttgactctttatcccaaacaggctaagcaataaggcccaacctctgggcttcctctggcgggagtctggggattagagaagctgtgatggctttcactagcaagtctggaaattaagatccacaggacttcctgatttttttctttccttatatccctaatggtaaactaggtacagtcatgtgttgcataatgacgtttccgtcaacgatgcacctatatatgatggtggtcctatgggattataagactgtatttttaccatgccttttctatgtttagatatgtttaggtacacaaatacctaccattgcattacagttgcctacagtatggagtgcaggaacctgctgtacaggtttgtagcccaggagcaacgggccatagcacacagcctaggcgtgtagcaggctctagcatctgggtttgtgtaagtactctgcgatgtttgcacaatggcaagtccacctgatgacacatttctcagaacccgtccacatccttaagcaacacgtgactgtattttgtagtgggattactctggcagtatattatagtgagaactgcccagagattttcatttttctttaacaggctctgcgtttaacttcttactctgccatttactattttgtgcacattacttaacccctccagtccccattttcttcttcttggcgggacatcaggaggcctcgaggagataatgaagacagaagcccgcactctccaggtgcctgatgtttgctcagcaaacaggactcaatgtcaaggtgctcttctgcttgaactagaccaaatagactgtaaacaaatacaaatcttctatacagctgtaataattgtctgaatattccatcacagaaactacctcaagattttgaacttgtaatgaattagatgtaaagaaatcttaatgaatgacctacaaaccacataggaaatgtctgagcacatttgaccatttggtacagaaatgaatctggactacgctgtaccaagtgtgtgtatacattatgcattcggcctttgttctctgaatgacacccacgtctactgataattgtattttagaaatcaaacagtatactcctagttttcttatattaatagtctagcctcacttaccgggcgtccaaactccagttctgaaaagaatttataccagggctcattttctaaatctatgtcatctggatttatgcgatcagtctagagcagatgtgaaggaaaagggaaggaaaaggcacactgagcaaagtgagggaaacgctgtgtggcatgaaaaactcacgcgcgcattgacacgcaaacatgcatcaactctcaccccacgaacctcagcaggagagaacggaggaagtaaagtaaaacgagtagcatgaggatgtgaaggcgagctccatggcagggggtccctagctgtttcctgcgtccatcgtttctgattggcataagttgtgggcaactcttgcttgagttgatccacttacgcttgaggcatgaactatggaccactctctgcggcagcgagactgggtctggctggcacgcctgatgtttggaataggctcaacccagtcaccaaatagctcttttgggcgagtcacttcatcgtccctgccctcattggtggctagcagtcccagcatgggagcccgcagtctgcagacaattcactcgggtgcaggcaggtggtaagcctgggatggggaagggtgcgggaggggtgggaagacaggcgagctggggggagggggacagggcattggggggctctcaggggcctgtggatgagaagattctggggcctggatgggtgcgagcgggacccgggggagtgggagtcgccaggctctgagcaagcaagggctgcacctgcacctctgccgggcatgaagaaaggtaaggaaggaaggagctcacccgggtgggagacagagccggggcgcgcgagcttggtgtgggggcgccactccggggcggaggggaggggctaccagtgacttctccgagtcgggagctagaaagaggcttccggccaggttcccttggaacaggtgtcggagttgttgggagagggggctgcaagaaagaggggtgcagaaactggttcattagatggaggctctgggcggaaccgcgaggacaccctggcagcgcgctgtgcctgcgttaggccgggaggggagaggcctccggacggcgaagtgtccctagggacccagacgcctcgggagcgatccgggccgctgcgaagccctgcccaccaggagtggatccccaggattcacctcccggctgcctgctctgagctgagaaggggatctggttcttcacaataccgtggatggcggggaaggggagggagcctggggtaaaatcccatcttggtttcctcgatgttctaatttagagaaaaagccagttttataattgacctgcttccctgcagaggtttctgaatgttgtttttaagatgaaaaaactagcagtgttaatataaacagttggagaaaatacatacaattattctagtaatagaaaacagatgtagagtgtttaccttacccagcagtgtccttaatattttcaaataatacatggctgactagattgatttaggctgctgattttgtagtaaatctaagagcttaaagtactatatacaagttattacttctttgataattactatatgacactaattaaatgtggtacaattgaagagtacagtatcttaagtcagaaaaaaaattctaagaaaaattatatggttccctaaaagccattcactctggctaggagaggagctgtgactcccaagacatattctaggaggactattaagtgctcactgcttcagaacaattcaatatcatttgcttacaattcttaaagaaactcagggacttaaactgaatagcgacatcttggttgtgaaaaaaatgctatgtaaccttcgcagtgctgggagcttgaaatgttccatattccaacaaaagccatgattttgacattgttctactgttttattgactcgttgcatttacaagttttgctaatgatacacagtctacacttactaataaattatactcacagtgtttttagtgatgtgactttgtttcaatattttataataaaagattataggagtaattacagacaatgatagaaaagtttgaggcatcgtgacaaaatagtgcaaaagcctaagttatccaaaagatgtagtgatcataattataaagactgtgtagtgtccctgggaaatgcttacaatgagataccaagcagtcaaaacggaatctaaccacgcacctgtacagtagttacaaaggtattacaaagcttgtctctgcatgaacacagtaaagaagtcacacatacacaaacgactacaatggtgttctggtattgcgactgtttgttttttctttcttttaaatattattttgctttattgttgtaatgttatttttgtaataaataaattcagagagaacatcctactattagacataggaaaatgcctagaaatcttgagatatttttccttctttatgccagtattatatttggtttacacctcagaagtaatagtgaaattggtagagacaaaatattctagtaaccaatttgctattttctgttgaatttaaaaatttaattcaatttatatttgattcaatagttgcaatagtattaattgagattttaatgtccataaaatactatttttctccaattattatttagatcattatagatgcataattgttcgtgaaatggctttgctggagctggtttttagggtaactgacaggagagagaatttccagtaatttctcttctgtttagagagacatactatttcttctacaggaaaactaacctctgactcttttaaacttcatagtttctaatgttacacactgaatgatatcattaattattataacttctgttttcaagaatagtattttgttttgccaaggggagatagaaacttctcttagaggaaacgaatctgtttaagaaacattatgaacagcagagggcagccaacttactaaatgaataagacttgttagctatgtagcttcactttgactcccacattaagaaaatatgtaacaaatggatataccaagtcctgatttatagtaatgcatctctatgatagaatatggaaaaggaagcagaatatctaccatcttgcatcataccttagaatggcagttttccatgaattatgcttttgtttatttaaatagtcaatttatagttacaatgggcaactatctagaatgcatgccaatagaaattagcagagaaaacacccaaaacaatgatagctggtaattatcgataactttggaatgcaatgaaaggcacatgtttgagcagagttgtgttaaaggaagtgttagtggcagaactagaattttctctttgctgtggttgccgtattgaatcttttaagtcatgcaataattaaatgtcctatggtgacctggaggcactgctaaggaacacagaagcctcgcaacagtcagtgacacacatacagatggtcagtcaacagatggatatacacacaaatcactaatctcagtaatttaacactttccatgtggaacatggacattcctttgagtacagcactaatattaacactcagaaactcatttaggaggtatgattatggtttactctaattgctcataaaaggcaaaagagcaaagatactgatatgcatctttctagccttggtgtgatttttttgttgttgtttcttttcattaaaaaaaaaaaaaaacccaccagcaaacctccgtttaaaactaactttgttagtcatcagtgcaagaggacgtgttcaagaaaagctacaactataaatcacaagtgatccttacttaaaagctaccaagggtgaacaactttaaaaattttagtgttttctataatttaaaagcatttaattgcttttgtggttatcgagattccactaagtattctcagtgaggcatgtgctttctatacgttgttctaaacaaaaagaagtgccagggctattttgtttttcaaattacgctcattccattttaagttttaatgacattgactaccgtgttttatatttattgtggtttcacaataaatgctatatacattattagttgggataattcttaatggtcatcagatgaaactccttaaatttttatagttaagtattgactgacaatctttattgataaagaagcttaagttcattaagggtttaagttgcatttcaactctgctacagtgttttcaatgactattttcttctgcttttatcattatgttcaagtttagttattgtaggttagggtaacattttcatatattttttttttactttatcaagcatacagaggtcctaaacaaatgctttattaatttttttttttaaatttaacattactcacctacaaacatatccaatgcaatgggatataaaggttttagtaatataatcccagcagagtttttatgattgtctcatggaaaaattaaattgtggaaatacggttctgatttgtggttcgagtcagttcaaggcaaattcctggtgactgctaagtacttttccagatcaaacattaggcccaattaattaacatttctaaatttacagtcacatgagtatttatgagcttcaaaaaagtgcgctcacttttactttccctgttaaagaacataaacgcatatgccactgattcctaaggaagatctctttgccagggtcttgggaagatttttgttcaaacagtactacccccctgccttctctgtatcccagggaatcgtggaattatgagtcactactaatagcagtgtgtcaaacccctccaagaatgttttgagacccactgggccttttgcactagaaatatataggcttcatggataaacaacagaacaaggattcagtccctcaccaactttttccactgactgcaagggtgaaacctgtgttccttcattcacttagaaattccacgaatgcatattcactgaacacctgctacaggccaggcatcgtcccaggtgttgggatacaactggtggaccagtcacagccctcgccttcaagaagctcaagatctcatgaggaacacagtgtgccatgggcacacagcagggagagcctccaacctaatgcagaggagtcaggcacattccctgggggaggtgggactgtgctgggacctggaggatgggatagaattctccatgtgaaggaagaggtggtggggagagcttttcctggtggggaggtgcagcctttacagaggcccagcaatgcgggaattgaaagttctctgtgcagctggaacctagcgaggcagggagggtgggaggagagatgaggctggagaggtcagctggagcccagtcacaggtcttctataaattatgctcagggtttcagattttgctcgaaggacagtgaagagccagagaaaattttgagctggaggttttataaagattttctaaagattgccttcgctgtggtgtggagactagactggagaggtagggaaatgaatcaggtggctgtcactgtagcccaggcacggacaattgtgggccagaagagaggagcagcagtggcacttctcctggcaggcgacactgagtccactgcaggagaggggaaaacccaagatgaccctttggaaaagtgggcagatggagaggccatgtagagattcaaaagagcaacacagaattgcccaggtgttgtgtatatttttcaaaaattgaaaatgaaaagagcaaaggaatgcttccaaggcatcttggagtcaaaagacatgagaatgcatgaataagaccttgatacccctcagcgctggccatcgctgcgacgccactctcattcagcacgcctgctcttcaacctctagcctgtattttcaacacttcagaatcttatgtaaactatatcagtacgcggccagtctctacatcaccacggcccacttggctctttttgttttctaatttatagaggcaattgaaacgaagtcaggactaatttttttaaaaagatgatgagctggtcctacactggaaaggctggccaacatgtcccatatggccagctcaaaccattctgcttaaggctggtcctctccaaaattgtttaggagggttaacatttttggttctttctatttctccataagatagccattctcacttccttccaagtttctaagttccttctacttatcttctcctgtggctgcagagacctatccacactcgaatctctgtcacactcatggctccagagtttcctgtcttacaaccagtcacatctactggtcctgtgtggtaactacttagggcctaagtttctgataaagtaaatcaagtatactttattgtaaattagccaataaataaattaatttatactgcaaaatcatcaaataagggaatcaaataactgctacttcaatgtgtttcctgctcagccacacctggagtggctgtacagcagcgaccaagtgcaccaggcatcagtatgcctgggctcaactcctagttctggctcccaccatgtgtccctggggcaaggcgagctaatgtgtgtttcagtctcttcatctgtaacatggaaatgccatgtgtctgcttaatagggctgctggaaactttacatgagataaggcataaattactaattacagcgcctggcatatagtgagtgctcaataaagatttacaatgattgctattgctattattattgctattgtaaaacgaggagtctttaaagtcttttttaacccaaagacaagagtaatgtgacaatttcaataacaatgatagggtcaatgtataaaccctaaagggagcaaagggagggttttttaggtgtgcgtctgttttaaccatataagaggctgtttactttgcacaaactcagatctagtcttgcatagatattaaatgatagacttgaagttcctcaaggtagagagtgtgtcctgttccccgctgtgcacctcacataaagcctggcatgtagctggtgctcagtcagttttactgaatgactaaataatagaaacatcgtggtgggagagcgtctaaaaccaatcctgtttcctgacaccacggctaccaaagcattccaataccattaccatgttcgttatcctaagagtctcataaattactagaaagatcattaaaattttgttatttaatttaaatctgagatatattatttcactgttttcaattttctgcaatgatgacattgtgtttcactcaattctcattctggaaatttcagagtagcatgatactcaatcacagaaactagtaaatgggttacaagtttgcaatggtgcctgcaaatcagtgattttttttttctttcagtttttcttttgtagtcctgttactctaaaagatatgagttatttaaagaaagggtaagaaggcttagacaaatatcatgtatgaattatctgatgataaggttttgaacatgcttctccagaacacaaccgcaaacacagggtttcaaagactcaatcaaggacactcatgttgggtgtggcaaggctagagtttccaattaaaccacagggctggccttggattatatatgagtgtgatttcttggagactcttgaaggagctccacaaagaaaactctctttttcctgttcactgacacctaaaattcttttaaagcaaaaatgagagtaaattgcaattgattgcaaatgttttcctagaagtaggcttggaaggagatgcagaggaactgtggagtttcaaagaaaatcctgaggacactgatttctgaggggaagcaaaggacatgcaagggagtattggggaatcaaaaccaaagaaggccaagggaagacctatgtgtgaacctgcgcttcgaggaggcaagtggttcttcttaagtgtatagatatttttgtttgcatataattaaataattggaaaaaatcctgcaaagtgaaatataatcttgatccattagaatgacaatcaatcaggaagcttgaggcttggtaacctgaggagggatttaataagaagcaattaaaacaacttgttatgaaaagggcatttggaaaattctcccttcatccaaagaaatattaaaaagccaatatggaaaacaagggatggaactgcctgggtccatgtatattggggagattaattaatgatttttctcattagcaagctatgatagcaattaagtattgcacttatgaacttttttaaaagttaaactctgattaatgattaggcacagttagagttacatgcaaatgaatcttgcatataaatatatatatgtgtgtgcatacacatgtgtatatatgtgtatgtatatacacctgcatgtgtgtgtgtatatatatatatataaatacacacacatacacacacacatacacttgtatttggtcagtaaagacaatatattagaacatgtatctttcaattctgagatgagatgtacaaatcattatacaaaataaacatgatttctaagtgattacctttgtgacaaaaattgctaatgggtctgaaattcaggtttattggggagccctgggagcccagcgagctggcatattctgtttaatgacaagtgcttactggtctttcatgctgaagaattgatgacttgccaggttcatattcaaaaatactccttggctcagaccgaaattttcttgtgtccacttttctgtctggaggatcccagtcatgcctagaaataaacaataaatcacacattaaaataatcctttttgcttaaagcaattgtgtaaaaccagttatctgttttcaacattacttttagcatagttttaaaaaaaatctctcaggataaaaagttaacctgtgaaaaataccacattcccccgccactggctccaaaagtcacatgaggggtttgtagacgcgcagagagtgagtccctgggttcctaatggcagctgtgtatatttgtgcttaaaataggtggcagtatgctctgctgaactatgagcatttaacccaccactttgtgacctttgggatccttgatccaaagtgacaaggagtaatgcacacaccatgtttgatcttatttcttgaagtgggatcatcgcttgggaagagcacagaagtgtcatgtgggttggcgtgcaccagagcaggcagtgtggaacaggaggtcgtcttttggtgtgagccttgaaaaaccagagtcaaacatctcattcatgggaaccagcacttttcccccaaggaatatcttccaagaggctgtcagaagacttacgaaggaaagcttcaaaaaagggtttcacaaaattaagcttttctaggctactgagctaaagaagaaggcttctttttttttttttttttcgagacagagtcttcctctgttgcccaggctggagtgcagtggtgtgatcacagctcgctgccatctcactcaaactcctgggctcaagccatcctctctcctcagcctcccaggggccatgatttttaggaggaaggattttctgactgtagataggggtaattctgcttccatggaatggaatgaaattcttgctccatggcccgttggaaatagaaatactctaagagacagaattagggacaagccctagctttctactaaattcatgactgatatggagcaagaccccttaaactttctcagtcttcatttttttccatttgtgtaaaacacagacagcaataatgtgttgttcttccttgcagaggagttttgagcattacatgagataatacatatgaaagccatatggaattttttaggaggttatcatatgttttaatgagatatttaattttaacaaaacatatcagatgggtaatacctttaaatcaaaacgttaattttggttattttttgatgacaaagataacaatttgtgtctagaaaactgtttctcaattttaaggcctcacataattcatcctgaggagattggtattaaaatgagacccctttcacacacgatgtgtgtgttttggtgggatgctgtgccctatatgatcatcaattactctattataaaatttttatttgttttttttttttagtgaagatgggatttcgccatgttggccaggccagtcttgaacctctggcctcaggcaatccacacaccatggcttcccaaaatgctgggactggctgggtgcagtgactcacgcctgtaatcctagcactttgggaagccaaggtgggtggatcacgaggtcaggagttaagaccatcctggccaaggtggtgaaacaccatacaaaaattagccgggcgtggtggctggtgcctgtaatcccagctacttggtaattgcttgaacccgggagtcggaggttgcagtgagacaagatcacaccattgcactccagcctgggtaacagagtgagactccatttaaaaaaaaaaaaagtgctgggactacaggcatgagccaccacgcctggcctgatcatcaattactcttaatggtacaatagggtgttgaatacaatttttctggaatgggtatgataacacttaataaccagtattaataagaaataatttttatattcttatttattaattgctaggatagcataggccttgggtttaatcagagctgagcttggaccctggcttggacataacgagctgcatgagctgagtaagttcctaccattttctaaactgcagtttcttcctctttaaaatagaaagtatctcactgggttgttctcggaatcaaatgatatgacacagaaaaagcacttagcctagtgcttggcttgtaatgagcgctcaatgaaggttacctataagtagaagtattagtcataatcccagtaaaaataacacaataaaaaagtgtttataaatttttattttcatgtagatagtttgtataaaaatatttcagtggagaaaggaaaactcgtattagcttgaaaaactggtagaaacaagtcacagacacttattaactaatgcctcattatgatttttgaataactttccctgctttcaaaaatgtctcttattaatagacctggggaaacagaaaatgaactgcatagcctgtaacctggtatgccaaaggaagtacatgtccattatttctatttacttgtctcttatatgtatgtattgatcaaaaagcagaaaatgtgtccatattacttcaagtctaatttagggcactccagtatcatgaaagaagacagggaaaacatttgctacaatcccagcagaggaggtcaatatggtatatgtatagactagcaagattacacatccgctctctctgtggcaggtgcactgattcttctactgaatgccatgtagacttatttttatcctaagcgaaacataggccaccctggggggaaatgccttacttttctgttgaagaccgatctcttggtcgaagcggcgggactggaggtggaacatgtgggggaggcactggggaggacgcatccttaaaggcattggggctgttgtcggagtggcttttggaaagaggtctgtaggtttgggtctttgcagcagggtgtgactgagcactgtagggtgggttgtacagacctatcatgacaaaaaacaaaagcagacaaaaaacagaagcaaatcacctcttaaaaatgaattaaattatttgtccccctcaaaatagccaatgattgcatagaaattattatcaataagcatattcataatgcatacattagaaggtagtttcttaatttattaatattaatgtactaatttccattaatttattaattacaaatttattctgtacctaagccctgattacagtaaatctttgtcaattatttcagaactagtaataattcagactggtactaggaatagacttataagcactcagcaaattttctcttcaattgtatacactaagaaaatagttcagttttcagagcaagattaaaaacggaactgtttccaaatatcttctaatactttaaaaaccctgatttacatatgaaaattgacatgctaattgtagtcaaacaaaatattgcacacagttgtgtttataaagtgctgtgcaaggtacaaggaaacatgagtcctcaatatgcttagagtgcacctgggaaaatcagacacaaatagaattatgatggaaaataattggtaaaagataataaagaccaaatgaagaaaacacatagtaagaattaaaggatgctagtaggtggtagattgctcagagaaggtattatggaacccacgagtccagagtcagccctgaatgagtttcggtgagcagggcaagaggggagcagggatggtatagaaaaaaaggcagaaaagtgcaaggtgtgaagccatggcttgcacggttagtagagagcaaagagactagctgcagttgactcgtccactgatcaaatgatcagcttgtagggctgtacaaagtaatatatcactgctgttccattcactaatcactaatgtgacacaaacctcaatattaaaacagttataaaaattctaaattttcctgcacccaatcattggagctaattctatttgtacccgttcgcttctcctgaaagtccatgcacatttccacagcaaatgaaaagagacaacatctacacttacagttttgcttggattcaacagtcggacttcaacttttgagctaaataaaggaggtgagtttggtgggcgtgggagcagggatgaaattaagggaaacatctttgtgggcctgaagctatcagtggggcgagccaagacttaaacccagagggcttgctgagtttgttctactgattttccctctatcaatttgtctttggagataggagcacaatcccaaatagttaaagggcctgaatgtggtctccaggggtgcagaacaggaggatcatgcgaccccaggctgcccagaggaccccaagtgaggttgcagctgctgaaggggaggggagcagtgccagcctccgagcctggtctaaagaaagaagaaaaaaaatagttgtgcacctgtcctgagcctgtgactgggcagggagaggagccctgggcagaatcccgaggcaacactcaggagaaagtgatgaagggaaaaacatttgtcaggggtccctccttccagcctgcagacccctgcacgagataccaaggctcgccaatccaagtggcagtgcctggaactgaagccattctattgtgaccactggcaattctgagtcagaaaagtggccccgccaagggggatttttaaactctttcaatgaatggttgcattttggagcaaaaggcagggacaaggtcacagaatactttgtttgacttgtttttggtgaagtgtatctgaaagatcttacacaattgtaatcattctctctgctgataaaagatctttatcttattttgtaccctgggttacagtgtgtcctttcagcctatccttcacactttggttaaacattcctgaagctgagaataaaccaacagtgggaatgaatgagataaaccagtattagttctcatttccatgagaaaagtcaatccttttgttatgcacgctctgagaaaagaaaagaaatcctcctcctaatatatgaactgaaaacatgtgctcaaacagaaggggaaaaaaggtgaccgtgtcgttcttccaaacattgctgagcataaaatagtcattgcgagcaaggaaacccatcctacctgcattgtatgtataaggagtattatacatgtctgtgtcatcatctagaaaatgaaacataaatattatggtaatatagattgtcaccaaaggacaacgagacagcagaacttcagacaaacaacagaaatttgttagaaaagcaacgtatttttcctagttcataatgccattttctttctttttttctttttttttaagagacagggttttaccctgtcgtccagtctggagtgcagtggtgatcattgcttactgcagcctccaaacctccaacccctgggctcaaatcattctcccacattagccttctgagtagctgggattacaggtgtgtgccaccacaggcctctgcaaactgcccttttttatctgtaacatattcgtcttgctgccctcttcgtagcatgcaaagtcaggcccttgtcctcgcttccccagaaacctctctgctctggatcgcaaatttcctttactaagtgctttagtggtctcctgtctacagagcaggctcaggcagacccgcgcaggctcactctcctgatgagagcagacaggggtggacagaggaacaatgtgtttttcacccaggcaacacaccaatttagactgtggacaggggaggatggagggctgaggccagagtgcctggttgtcctccatggggaggcttcttggcagctcaggtgggaggcagaggcacagggatctgtcaccggaggggtgacagaaggagaacaggaggcatgctgaaaagaaaggggacacggagtttgctggggtcttgacattgtgtgtgaatcaaaccgatgcaaaagacgaatgtagtcccttcaacccacaaggacctcatcagaaagcagagcagcagacatacccggcttgtgcaccatgtgaatttgcttaaacatcgtcttgtaccagtccttgggccggtcgactgtctgtaatgaagagagcgtccaatggttacaaactggcttccaatcaacatcgcttctcagtgttttcatttctctattttatgttcttaataacagagtcccattctgtgataaaatgttctgactctttgctatggcttcatgacagtttcagcaatttacttagttatgtgtgcagtttgtaaacatatggccttgtgtttgaatttaggctgagttggaacattagatgctatggttttattttttcaagttatagctgtaccctgcactagagagttgatatttgcacaaatatataaagttcacttaatgtaagttattgttgtactaatttgtttaactccttttggtagataatgatcattatccttagatgctttttattgaatgttctgtaagacagtgttttcagaattaactggggaatatttttgactcaaattgtattctgatcagtgtggctctagagaaataaatttgctatttactagtctaagctactaaaatactgaatgtagtaggcatcccagagtcctacggaaaatttaagaatgtagatattgcttcaaaaatgctaatatgataacagagtgtatacaacatttgctcggctaaaattgtaggttccttgagagtagaagtccttacggatccaggcgtcggacatgaggggagcagtaggctgtagtggaaagatgaaattaatgtagagtcttgaactaagattcaaatcttggttccttaaattgctgcttaatacaccctagcaatacgaatctgggcaagtcatgtcaccttcttgagcctcagttttctcctctctaaagtgacataattatatctaaatcataggattgttatggaaatcgaatgagacaatgtatacacaagacctagaacaatgcctagaatataacaactactcaataaataataacactagggaactgcaaatatttgtagaatgaaataatgaatgaacgtagcctattggatagagctctgcctttctggatacctgtaaaagtagacacatgcttttataatcgtactcacagattttgcttggcaagatcttaccccaactctctgagagctacctgggcaacaggcttgatgattctgcttatagtaactaaacacaccagacgttccaagacagatctcgatttaaaaacttctgttaggactgatacgaaagcattcttatacttactagactgagctttgggttagattttattgcctgatctttttttccccagaaatgtggtcactgcatttttcctctggacattaagggttttgtgctatatctaaatttattttgacctctgagaatatattattctgaaaaatcaccccaaatacaggttaacatgaagggccacttgacttcgttatgagtcagctcttcattctcggctctttctccatggaagagttgaggttattgattgactattcagtcaaaggacgggacatggtggaagggattgcagtggtgaagcaaaggtctattatttgctggttcaaagttgctaaacatgtatctttcaagaaagtttatttttataaaggactgatttctctttcattaaacctcatttcttttactgtaccaaagcaacagaaaatacaacatagtgttgtgcaaaaatgttttcctggacgtgctgatggcaacaaggaagcctactaagtaagtcctatcactgtatatggcaatacatgttgacagacaggtttttttttcttcacttgctggagggcctatatcaggtaggatctcacagtgatgccatctgctagctttatatggtgagcacaaagatgccagaaaatgccctgctggcaaagggaaatatgaagctggaaaaataaaatacgaaaactctatgtccctttctaaaagaagtactctaagcatttaaagttccttttgtaaatgccatcatggagatcgctatgcctaaggctgagaataagaaaatagtctactcaaatttcaggaagtttacttttgtacgtaaaatcattttgcatgaaaaatagctactagcaattcactatgccgttttttctacaaccttgactaaatagacctgaatttttacattcctacagttttcaaaacatcagaactctacactgatttaacacgcagagatttcaaaaaagataaaaaaggacatattttctacatagcagtatacagtgactctgttctatttttttctccttttcagttttgaaaatactcaaacaagtgttatattggaagtagaagaaaagaatcttgtatttcacttaactagctggccttaatgacacaatctcatgggagctgagccctggcgatttttgttgttttgaagaacagcactgaaaggttcacatagatgtcccaggtcacatgagagagggcaatctggagagctgattccctgcattaaaatagctcaaaagtactgtttgttgactcttggctttctagagtttctggatgactttacaaaattctgtttcctcggcataggctggctgtctaaaacgatactgcagcatggtacattgtgacagtaccgcctttggcaaatacactgaatctgatcatcattactttctacacatgagaaagaaaaacaaccttggagagtcttggcctgctgtggctcagagacagcctgacttgacatttataaccacagctatacatggggatgtactctggagggctgtatagtcagtgtaagaggagagtcctcatagacctggaccttctttgtcaagttttaaaggtccaagtaagacaacaattgtgcataaaaattacagttccttataaggaacttctgcattggttatattgtgttttctattttatagaagggaaactggcattaaatgtttagtgtgtttgcttatgcatacccaaacgtgcttttgatttggcagttgataaacattttaaaaattttaagatgatttaattttcatcaaccatctctagcatctcagtttttccttttgaaactaaccaggcaaagtctggttagttaaggaaattatgtcttataaaggaagaaaacatggaccaggcttgcatgtccattatatatcatttattgacctaaaaacatacccagatatctttgataaaatcctctcagacagaatctataactacatagaatcagggctttcttaattttgtctatactatgcctcaagtgccagttacacaaaaccaatgacaccatttctgtctgactgtctatccctatataattagaagaaagtttcaaatttaaccattttgagtcagaaatcttagaagggaaatgaacaagaaaacatcatcaccagaaacatgtaatcatcataaaatgaagaatattggtcataatccctgaacttttctttggcacataaatatggcaatcgtcagtttcaagacagattgttagaatgtcatatcacattcaacgtttcctcaatctaaagagtctaaaaccccagtaactgctgtacagatttactttttggctttcaattgtaatatagatgctgagaataatccattttaaactcttctgtctgtatataaaacacataatccccatataagaatgtaaagtcaaggagagaagaaaatccccacactttatcgttagttctttttgactgtttccaatcttaccacggctttttttttttttttcctgctctctttcccattctttgcctctatcccttattgtcttggctgcccaggtctgcattccaggggagcagctcttggccacaccccagctttacatgggtcttgctgcaaagtatatgcagctgcagtccctccccgcatggcccccaacttcacctgcaaaggtgttgttgctttcatcctgtccccggcttccttctcccggctggcacaagccttctcttccagtggacttggtcagccagctgctgcctgcccaggctctcagaagctgcctctgctactgctgcgttttgccggaaggggctgcccagatacactgagcaatgctttggcagagttttaaaacttaaaaaaaaatccaaacactttcacttatcatcccaggagagctctcagcaggcacggctgaagagggacattaaaatgtgtatttttcttcagacagcttttcctttccatgacattaactctcttcactccaatcatctcacctcccaactcccaaatcacagcttccaatctcccggtgttaacacacatctatttcaaaaaacgaacacatcactgctttattcgcaatgcatgtgggaattcaatgcagccaaagaatttccattgtcttgttccttctcttttctctctattgccctaagcctccttggtaaaaggtaaaagaaaaacaaacaaacaaacaaactaaaccacacaacacagttttaccatttaacaaaatcgcaatgttcatgatgtttcattcaaatggaaaaacagattgtgtaattctctcccatcaacagctttctttctctgccacacacagcataacattcatgagaagtcggatggcacggagggcaatcctccttatataagaccctaggaatgcacaaagccgtggacaatccgtcctttgtggagtctgtgcacagccccagacagacgcacacgctggcatttcctaccgttctaattgctgtggggattccggattcatccacgggcccgatccctgggtaatgcggggctttgatgactgtcactctcttctcttcctctgaggatcggtacagggggatagagctgctggtggtgccatccagagactgcgcatgctggggatatgtgtctgtggaatctgcacagaaaatttggtaacatggaacgtattcgttgcacagggaatcataaattcatgtgtcttgttgtatatttatgccaactgtaacacagagaccatattgccatcactgtcccttttaactcatttactttccatctgagctggtggaaactgtgtaggtgtgcggggaacagacctataccaacaagggcctcaccattttatgaagaaggctgagggaagaatggcatttgttaaatgactgtgtggaggcctctgagttaggaagtgctctaaatgcattatctcttcttatccttccagtaatctttgagggagggcaggatagggggagcaagaaccagtgttatagataaggggcaggagctgagacaagttcagtaatttccctcaggtcatcatttacatcaatattattcttgtgatactgctactactattatttataggttttgaaatgtatttccagacaaagacatgactgttgagtcagtaacagtgatttcataaaaatgaagcaaaaccaaaaatcacttaaaaaaatcttcacatccaagcctttggacatgaaagcttctgaataaataaatgctgtaaaattattagtacgatttcctatgtgcatttttaccttaaaatatcaaaaactatgactttttactctttgatgacaaaaactgccctaaggatataatttagatgaggcttatcgagttcttcatgttttttagtaacttctagaatactttcagaagcaacagagtacagacatgcagtatatagtccatttacttctaatacacaggaattttaaaaaaatcatcattattaccgttcctctggtatgattaataatatgcctttatatttttctgcaattaatttgaaaatgttggtgacaaagaatgacactttgtatatactctttatatcatggtttgtcaggactgccactcagaaagtcctttaaggtggaaatgaaaaaaattctcatgtttcagggtgggactcattgatatcattatgtgtatatgatatatatcatgtataaatgtatttttcatgaaaaatttgtataaaataagtaagctttttttttttttttttgagatggagtctcgctctgtcacccagctggagtgcagtggtgtggtctcaacctcagcctcctgggttcaagcgattctcctgcctcagcctccagagtagctgggactacaggtgcgtgccaccatgcctgtacaaaaaatttttgtacaaaatacaaacaattttttgtatttttagtagagacggggtttcaccatgctagctaggatggtcctgatctcctgacctcatgatccgcccgcctcggcctcccaaagtgctgggattacaggcgtgagccaccgtggccggccataaggaagctttttaagaaattttaactcatcaatataagggtaattaaaattcagatctctctgaggtaaaatccattgtaacatttgtaactgctattactatgattatgactattttcaatttagtttgcatcagaaagtcatttttaatacattttttgatgaagaatggataaggctagttataaaactgctttatgtgcagtttatgtgctggatggtgacataaaatgtccctgaataaacgaacagcatcatagcctttcaacactgaatcagtgctggggaaggaggtgtgctggctgctgtcaaagaagacatggtggttgaagtcccgggttgtagtttctttccccctgctactggccccttgaatgtgaaaataacattcaagctagtccttatttttacttctttattttttttgagacggagtcttgctcagtcacccaggctggagtgcagtggcgcgatctcggctcactgcaagctccacctcctgggttcacgccgttctcctgcctcagcctcccgagtagctgggactacaggtgcccgccatcacgcccagctaatttttttttttgtatttttagtagagacggggtttcaccatgttggccagactggcctcgatctcctgacctcgtgatccacccgcctcggccttccaaagtgctgggattacaggcgtgagccaccgcgcccggctaagctagtccttattaagacacggtgagatatttgacactaattgactttctatttaattccaaaaaggacttgagtgggcctccatgatactagtatttttattagcgacgaatgttttttgaacaccagcatgtgcaaagtcctactctaagcaaggagaatcaactctgccttcacatctgatccattacattctatgaacccataccttatgcaatataagttaaccctttattttattattctcatatatggtccactagctgtcatcttagcaatcttttgtcctaaactaagtgtaaaattcatctagggcaaggtagatgtacatattcctccgaaaccttatcacagcactggccagctggaatttgttcagtgtttacattgggaatttcttcccatgcagaatattttatatgtaaaatctacttatcaatatattctaaaatcaaagcctatctacattcaagtatttttgttgttgttgttgggtggggatagggacaaaactgcattcactaagacaggcaatgagacagagtcaggctttgttaataattatttgggaaaaagctgtggctagaataatttgtcgagttttactttatatgtgtgtaaatgcatagttccattttaaacaatctagatataatggacttccattataacaccacactatgggctgattgttaaagggcaaaatttcggcataaaccagttttactttcttaactctaaaaggacatcattgtaggattcacagatgatcctcaggcatagcatcagcgaaggcacagatatatttagactttaataagtcccgcggctacctttaaagttttatagttatagagctttggttgacctcagaagctgagttccaccatgcacatgctggatggtgacataaaacatccctgaataaacgaacagcatcatagcctctcaatactgaatcagtgctggggaaggaggtgcactgtctgtgtcaaagaagacatggtggttcaagtcctgggttttagtttctttccccctgttgctggcccctgtggccagaggaccaggcctctccttttctgggaggtgcaggatggtgctgctgtcctgagaattcccctctgctccctgctgtcctagaagcttcctagtgagtcgacatcatggaaacttgtacagcctgaattcctatgatagttcaatttcgtattttttttgatattttaggtttttaagttacatttttacaaactaagaaatatttatgggccgggcacggtggctcatgcctgtaatcccagcacttagggaggtcgaggcaggtggatcacctgaggtcaggagttcgagaccaacctggccaacatggtgaaaccccctgtctgtactaaaaatacaaaattagctgggtgcggtggcgggcacctgtaatcccagctactcaggaggctgaggcaggagcatcactggaacccaggaggcagaggttgcagtgagccgagatcgccccattgcactccagcctgggcgacagagtgagactccatcttgaaaaaaaaaaaaaaagtatttatcacattattttctgaactatctgaacatacttgaccatgtaagagcatttctatcactgtacagcaaagcttctttcacaggaggccacaaaaagtccatgagccccaggaaattatctgcttacaattttttatgaacgtccgtatgtccatttgttttctggaggagagctctatctttcactgaattcctagtcctcagagggttgagaacgattgctctatacaatgacagaaccttcatttaagggaacacttaagtttctcttgtgtggcttcctgctaccatatccctgactgcaggtcttccagccttggtttgaatggtggttttctccttgtgtgagccagtagatgactgcgtccctgctatgtgggacagcctgtcctcctgttacactgttttaactgtcaaacgattctcccttatatagaccccaggaaatagtccatggtggaagctcttccaagtccgaacaagctgccctagtggaaaacctgcattcatgtcctccagtggcacaaacccccttgccctaagtagccattttctttttctttctactccaccacctcagacatctaagtgcccacaccaggctcagacacaggtggagacatggtcttggaatagcatggtgcccatttcctcccatgttgggtcctctgccccagtttctccctggggatagggtcatgagtgctgagcgctcccgcctcaccttgatgccgcatatctttctcctgtggttgtacttgccgcattgaggttgccatggaaatcacggtgagtaaattacttaccgagggatgtgccgtgctgcatgacaatgctggagttgagtgaggctgggagagaatatgccgagggggaaaacggcctctgatagtaactcatgggactcacggcacctcctgagtttccattcactgttatctggctctgagaaaagcgcaaaggcatcgagttaaattagcacatagttccctgtaaacatcattccattaggtgataataaaagacttccaatcacatgagagtaatcagctgccaagctcttatttattttgaaaactgatgtcagagggcatgctacattctttgccttctctctattcccttatttctgaaaatcactctcttgtgtatctgagggtccagggagtggttaggaagaatgaaagtggctgactagtgggcatgccactctgccaacagaggtgccaaatggtatcagtaggagtcagtaccaagtaaatgtggaggacgactttgctctgacagtcgtaacatcagcaatcagaacacggtggtgctgttccgcatgcagcattgacgtggatgtcctttgacatgaggcaagggattggttctcagacttagtcagggatatcttctagtgaatgaatgtttccagagctggtgaataacataaggaacctagttgtttggatgtatatatcatgaagcaacctattctagaaggatcaaatacctggtaaaggatcagagagacatgttcaaccactggcttctccctacttcagcctcattgagcacttcatgaatctctgtttgatttcttaattattcattgtttcgattgttccgtatctgactattttatatccccaatggtatctcaagcttcttgttgaagatggtcatatatatgcttctttaatattttgtataacatgcagcctagtgctgatgacagagtagatgttcaataggtatctattctgatggaactgaatcggcttagttcacagatatcgagctcaggactattaagcatgcctgtctacccacagcacagtactgatcattacagggcgcacacaatgcatgcaaataagatcaaacattagtaagaacgtttagttaaaattatagctaaatacacacaacacacataggcacacagataaagaagcataatttgtgaaacttttctacttattttaaaacaaaacaaacttctattccacaggcttgaaacatagatatagtaactgtgtatttctatgatttcactttaaagcaaatgggttttcaaatgacctagaataagtctaatttcattactgtataaccataccacttatgtccccaaatcaataaacatttcattacaagccttgtgcttattgattaaataattctctaagctgttagaaaaattacactcatatcataaccagccacatcttgaggacctgctccctggagagagctggacgttcaaataactgtgaggcacaggcctgcccaaatcttcagagcttttatgtacctctgatggatgatttgagaacactttcacctccttgcccaagttaagtttggtggatctttgtcaatatcattgtaatactattataacatgttataattaatgttaaaagctgaagaatccttcttattaaaaaccatcaggttaactatattgctaaacctacaaacttgctctgaatcctattttgatggtttcaataatattgactaggggttaaaaaagtaaacactgagagtagatttattcttttttttttttttttttttttttgagatggagtctcgctctgtcgcccaggctggagtgcagtggcgcagtctcggctcactgcaagctccgcctcccgggttcatgtcattctcctgcctcagcctcccgagtagttgggactacaggcgcccaccaccacgcccggctaattttttgtatttttagtagagacggggtttcaccatgttagccaggatggtctcgatctcctgacctcgtgatccacccacctcggcctcccaaagtgctgggattacaggcgtgagccaccgcgcccggcctagatttattcttttattgtgttcaaccaatcaggattttatgactaaaatactatcattagcattttagaaaatactgtattgttatagtgaattcattattaggaaaaacatgtcatgaataatctatttgcaattttaaactgataattgcaattaatttcccttacaagtagctctgctcgtgcccacaagactgtatataagacagttagtctcctgtaaagtcttaaaaacagaaaattgaacaggttagttggtagattgataccctctcactgccttctttttttggttaaaggtcctggtaaagttttaaaagctaagaaccattgaagcacagtagggcatgggaggaacccacacctgctgtgctcctggtgcccgtagttgggctggtcctctgtggcagggagggactcgctatggggttaggcctggaaaatgaggctccttctgtagccagtctctgaatggagcatttgaatgcaaagtgttagacacagccattgggggaataccaaatcccattaccaaaaaaagcatcttttactttatgtaaattgtagtgtcttaaaaaacatatggcttattataacatttctctgcgcataaaatttgcagacttatcagcttgatagaacataaaacaatgtagcacaaataaaattttgtctatgacagtgcttattcggaacttcattataatatcaatttaaaaaaaaaatctgatttttttgcctgaagctatgtgtctcttaaatggaagccattacttagacattatatgcaatatagaatctgtgccataaaattttgaaacattttagccattcacagatcatttattagggattgcttatcacatagatatatttaaataatatatgtatggaaaagatgtatatattgctataaatgaaagacaaattattgataaacaaaataaaaaatgtattcataaatttctgtcctgaaatggctcaggaagaataatttttaaaaatcgtacagctaaatttctgaaaggtagataggattatcgacatcattcactcctggacaatagatgagttcaaaagttgtagctgttagagaaggaggaacaagaaaaattagcctcatgcagtcagtaatcatttatgtgagaaaaaggatatagaaaagagtcacacaggacacattaatgtgagtctgtgagaaaaactgctaacatgtattaatactgggttaaaattttttgaaaaattttagactttatgatcacaacatattgtgatgtatacttagctaataaggcaaatcactgtagaacttaccagctacagtaacacgggaaaccgtaagtaactattttagagtaactataagtaattctaaaatgaatgaagagaatgaagtgactttttcagccttaagcaagcttataggatgactaatgatttccctgacagatggcatagaattggtttgggaatcaacacctatgtaaataaaaatgtcagccgaaaaatgagatggcacaacaaatcagtcctttcaaggaaacggtggaggcaaagaaaggcagaataattacatgagtggccgcaggggtggttaaggtggtgccatctgtcacagcagacctctgaccccaggtgggggagggtgtctcagaacggccagtggtgtcagagtcaccaatctgcagctcctccagcatggctgtggaggactcactctccgagcgggaggagtgctcggccagggaggagtctgttgtcagagagcctgtgtcgtggctgtggatgaggctttctggagctgggagcaggtgtttgtataagcaatgggaaaggctctggggattatgcaggcgtgaagaccccacaccatcggggggcggaaggctgagtgatgctgagctggtgccactgcctggtgagaaagtggctcggttcaaaggtaccacggaaggagggcacggaggagaagcttctggtgtggtttgtctgtgtgtctgtgaagcatttacctccaacacactggcaggtaagttctgatttccaagctgagtatgaggaaaaaataataagagataaattatccaattaacaaaagtacctctttttgcgatgtggcagagaaggcaaagcatcggttttatttgcaagcactttaaggagttacattcagatgggttaggtgccaaccacacagtgcagaaaaagtgtgaaaacaggaagaaagtgaatccagtcggtgtgttttgaaacaaggccggttttcacacagcactgcaatgtaattctggttaggggcttgagagtgttggcataacgaaactgtttcctcaggagttttagtttttgtatttgtgacaatgataagatatcagactatcggtcagcagaattggtttgtccttcactagaaaaatctaatagcataattgcctcccccttgccaaaatgtccccaaaacataaatctgtttgtcttattttttcctggtttatgaatctaaacactgataatactaaacacaactaagcagaaaagataaatggaaaagatgttttatttcctttccactaattaaatctgttctttgatttcactacaaaatacgaaaagaattggactttaaaatatcctagcaatgcaaatagaggtaccatgtgtgaaaatgaaaaccagccactgataatagttagaatgtaccctagttagttagaactatggttggcactaaatcttaggtaaaggagaaagaaactgaaggaaaaataaaagatttaacagctccaaggctatatatagcccaagaggctaaacatagcgaagggatgctctgtaggaggaagagagaagatgaccatttgaaattttacaaccacctgtggtagcctggatgacgtttgaccacacgtgacaaataggatgataagtactcaattcaacgtaagtgaataaaactccgaagcaacttttcttacttattttttctacctttcagaacagacactttttggaggggatgtttgggagaggaaatggttttaagatagatggccagaggtattgtgagatattagtacaaagatgggaatgaatgaaggagaactgtttacacttagaaatactgcctagtaaatgtttaagttaaacaatttggtgttctttggcagccataattttcataatgactgatgtcatgcacgttgttagcataataaaaaggttgcaataatttttttctcagacttttacttgaatacttttaaaaaatccatcatataaaaaggtctctctgaatcatagatcccttagaaatctgataaatgtgactgatccttcttttggggaaatgcacaaattcatacatacagaaagttctgcataaacttcagggggacagagacactctaaagcataaccttaatctaatgggttaagaaaccccaaccttggataaaaagacagattttcttgtcctaatcttacttaatatgattttttttcttgtttaaacatagtcattttaaatgtgatatatatatatatatatacgtatatatataatatatattttactgttcatggttgtttaaatctctagaaataactgacagaaatcttagttacccagaacttaaaatgttttggtggggatgcatccttattattactgagtgtttacaataattgcaatcttattggaggtgaaactttaatattatgaaattatcataattctaacttaatgtattaaaatgttgctataagtctgaatgtaattcagtataaagcagtctttggatagcgtcaatgaaatttcccctaataattcagctttactaaggatgtttccatgtaatacgaatctctttttagttttatttatgctaaatgaaaactatgaaataatacaaatcatacaaaaggatttgagttatctgctcatgagacttttccctttcaaattaaaagaaaaaaatctaatgactttaacccccattggactgacttgtccatatcctatgacttgaaacatgtcaaaagctaaagcgtattctaaaatcaccattgtcacgggtaatatgatcattagtttgcatagcactgtgtctggggatggtccttacccattcaattgttcttccaaatagaatgtccacagaaaacaaaattattccacctttcgaatttctttcaccacctcctgacatgctcctggttttgagtcttttaatgcacgtgtgtgtatgggtgtgtatgtgcgtgtgtgtgtttgtgagtgtaaggcatgaaatgcctcgtggtgagtcacatcacacttaaatttctacagataaaactcaataattcaacagttatactggtcacccacaaaaaagctttgacaagaccccaatcttcacatgaatggaatataccctgtagacccaaggggaaagaaagaccatgttacacgtgtttctcctgaggaaaatcagaagagcagcaggaaaggtatgaaaggggaagaaggcagtattttcccaatctggactacctcaaaaatagggaaaactggctttaaacaagtgtatttttttcttacttcatgagtggcaagtagatgactgcaggtaatcatcctaattgttttaggtctccttcttttcaagaccatggaaggctaaggtgtttgaatagggatcaagggtcaccaactttttgtgagtataaattgttttttctttccccaacccttgagctagcaggaagagggtaatgagaaacaccagctagcagccaggggctgcctggtcttctgcaaaggacagggacggtgcttaaaccttaatatgcttcatataccaagagagagcacctgcttactcaaactagcactgagcttcttcgtccaaatgactccaacccagaatgctaaagagagcctgtggatgagagtgctcaccaatcaacactggagctcctgaggaatgaaggggcacagagattcaagggagggtgagcttcagcagtggaaaaagtgtattgagttggatgaaggcattgcaaactcaagtgcccatcatgggtcaggaaagtatccaggatgtgcaaatcaagcccgtgttggatgacagggaatgatgggaccgatggcagaatgcggaagtcatgttccccctcaaggcgggcgtcattgacccatatcctttgccttgaaacacgatgaaaattaaagcttactgtctctaagaccaccatagtcatgggtaatatgacctttagttcgctcataagctcagtgacaacacatctatagtcataagcccctaagctgtcacttgctgacacagcagatgtggaagctggaggtggaagagggtagctgtggagcggggatgtgaagaaggagtgcatggccaggcctcaggagaggaggggaaagtgctcgttggggtgcaaaacttaaagagtgacaaaaaactcagtaattgagataaattctgtttcaatgcaatctttgaaagaaaatcaacatcaatgcaaaaaagcaaaaataccccatactgaacaaaaatgtcgaaaatataaatgaagaccagcgcatgccaagccataggaaaagagagtctgggtctggcgtttttaatgcaagaaaactcatcaataatattttcaaaatctacatttttgcttatttcagttttagttgagagaatagacatgtttgacaatttccaattaactgatggccatcttaaataatttgtaattaatttaaggtgaagtaaacatgtaatagggcaagcgcagtggctcacacctgtaatcccagcactttgggaggctgaggcgggcagatcacctgaggtcaggagttctagaccagcctggacaacatggtgaaaccccgtctctactaaaaatacaaaaattagccaggcgtgatggcaggtgcctgtaatcccagctactctggaggctgaggcaggagaattgcttgaacctgggaggtggaggttgcagtgggccgagatcacaccactgcactccagcctgggtgacagagcaagactctgtctcaaatttaaaaaaaaaaggtttattttgctttaaataaaatatttaagcttaaaataatgtgtgagtgttaataacgtgcgtttcaacttttcaaaaaaattctaatgacttaaacattctaggaaaaagctcattcccaatatatgaaaacaggtataaggaagcacagaatttccttccacctcaggttccagttggcttgacatggccctgaggtcaaggatcctaacatctctctcttaacacctttagtcattgagcttctaggcctcatttctcaaggaacataaggaatatatattaaatgtcaagcaaagaaatctgacaggcttttgttctcttttttccaatgatagtaatttacttgaaaagaaaatatctaggaaggggtttttttttttttggagtcttgctctcgacctccaaaagtgctgggattacaggcatgagccactgtgcccggctggaaggggttttaaaaaaaccaatctttacctcccatccacacatcctttagggaaaatgtgccccctcttttcatggcctgtcctggtggtatgaggagacctgcctggcagctgtgtctgttgccggatcatcattttgctggccacagctgattaggaagggggagtaactggactatgctgggccagtggggccctgcctccctcctgggaatttgaattacgtgacactgaatgcccctcaggtagctgtcgggtacccaaatgcaaggagtcagagagtatcatggaaacccatgggcaacttgaagtaacgacagagcagaaactaagagacagacagggaactatgcagttcctacgactgagaaggatggagggtagctgcctggccattgccccgtttccctaaggcctggctgtattgcctgcattgtaatgatgtgagattgtctgacagcctcataataaaaattattttaaccatatactccccacccaagagctgggtgacaagtgatctaaaattgtcacacagattgggcacactgacagcatgtggcatctgaatcaggggagtaaatatttctactgtactctgtggtattcagatcgggaatatggttttgcatctgggaaagtgtcatattttaagaacattatcaaaatatgggatttaaaaatcagcttgtgtgagagcatagaggtagcagaggctagtggctgagctgtggatcttgagtcagacagacttgggcaacttgtttaatttccttggcctcagttccttcatgtgtaaaatataggcatggataaaacccatctcttaaagcctgtaaaaattaagtagggcaatgtaaagtgcttagcacagtgcctggtgtgctgtaatagctctcaaaaaaaggagaatcatgttttacaaaattaaaatgctgggaaggaacaggaatgctctgcacaaagccagtagcagggtagggaagagaaggatcacgtgaacactgtcagatagaggcggaagaacattctgtctcttttgctctgtggataaccatgcagaagttaaggaaggcagatcatgacgtggtattagaaattctttccaataattcgatctcagaaatggccaagcactggactgctgccttggaatgtaactgagctcttcattaagtgtattcagaaaaggctggatgcccatctattgggagatgttgaagaggacgttttatttgtaaactcatgttggactcccaagtattctctaatgttcaattatttaaatacatgcatatgcatgcgcatgcacagacatcaaatggagaaattgccaaagacctgatcaactaatagcattacgagcccacagaaaggaagccatactaatggaagacatcaatgattggggccggtcttgatagcaatgttccagaaagtgcgttctgcagttctgcacctattatcccacactgctgacatgtctgcattactctgtcctccttagtatctacatactgatcccatggagcaaaagaaatgagtttcctctcccttctacatgacagtcgggcaagttcccctgtgagtccccagcatatgtgcagtggcagctgtgaaggtgaggctttggcaaatgattgattatgttatttcataacggacaggacaagcttatcttcctgaagcaaggaacatagcacagatgccatagaaactgtttgggggtgtagctttttgctggctttccaaagtgtctggcttataccttcacttacttgacattgagaacaatgtgacatttttagcaacaggatatctgatcacacagtgccataaggataacatgcctcatttctggtctgtttgtaggaggtcaattaaagcacatgccgtttagaaaacactatgaaaaattgtcaaatatgaagagaatttctaacagtgacctgtagttttcttcttaaattaatgagcagacattaataataacaaaactatgtaaataaaacttctgaaacactgaaatgtacttttcacatcttggtgtacttttatcgcttggacctgctaattcctgggagcctaattctttataatggagcacatatttggctgactcacagggtatagcttacagtgcttggcattggctgagacttgccagaatgcggagtgcaagtgtttaaaatggaaaggtcaccattgtgaaaggtcattacatggaaaatgagacttaaaaatgaagcatatcacaatcatcaagatgtagaaacaaaccaaatgtccattgatggacaaatagataaagacaacgtggtgtatacgcatactaggatactattcagccttaaaaaagatggatgtcctgccacatgctgtaacatggagcaatctggaggaccttataccaagtgaaggcctgtctcagaaggacaaatatctgagcagagagtagactggtggttgccaggcgcttggggaagggggatatgagttgctattcggtgggcataaagttttagttatgcaagatgaataaatcctagagatctgctgcactgcatggtgcctacagttaacaatactgcattgcacacttacaaatttgttaagaaggcagatctcatgttaaatgttcttaccaaaattttaaacagagaataaaaactgcaacagcttcatgctaccttttttaaaaagccttagaaaagaggacacgctatcttggaacaaactgaaagtctgttgaaataaacttttacctaccagtaaaaaaaatgaagtattgttgaaaataatatatttctttttcccaatcagatgcataatttggaaaaatattatttaatgatgatgacagctactgtatgttgaagaattaccatgaagcaggcaccatgccaagatccttatatgccttactcaaacctcccagcagttctatgaatggttgctatcattgtccctgttttatagatgagaaaactgctgctcggggagggtgaataactagatgaatggttttatgttaataagatcttgaaacagctgactgcccaaccactttcttcccagtctctctcatacccactccaagaaagcctccttccccactatggaatcaatggtaagttttcagatttcatttcaaacctgtctcatcaacagcatttgtgcggtgaaccatccctttctttccacacattttcctcacatggcttttaggatgccacattttcccagatttcctcctcccttagaggacactgctttcagtctcctccactgcttcttcctcttaatgttgagattcactcaggctcaactcttggtcctccccttttctctgtccttcccctgctgatctcactctgtctcatggccacaaaacccatcgactagccaatggctgatacctccaaccaggacctttcccctgaagtacaggctcttacatccaaatgctcacttgaccacttaatgtgggtgtctaagaaatgcctcaaacttcctgtttcccaaatggaacctctgaagtttccaccaacctgttccacccacagctgtccagtctcagctgatggcgatgctatcttccagttggagtcaaccttgacttttctcttcctcacatcccacatgcaatctgccaggaagtcctgtttgcttgactttcaaaatacattctcacagtctgatttctcaccacctcctctgctgccccctgctttgagccccatcatttcttacctaaaggactgcagtagttacctaactggtttgcctgatctcctccttgccccactatggtacgtttttcactgagctgccagaatgattttgttaaaatataagggaaataataatggtggtagcctcaacatcctccagtgacctccatttttattgagagtaaatgtcaaaatccttgcaatggcttataaggcctcctgtcatctggtctttgttacctctgacttcacttcctatcactctcacctcacttacttcctctccctccctcaggcttccttctggtcctcccacagccccagcatgatcaacctcaaagcctttacataagacattccctctgcctagaatattcttcctccttcaaagctgttctcttttcagtgaggtctattgatattgagttaccatacttgacatgatatctggtctccacatctctactttgcatggcataactcaatttccataatcttctaatatatgtaatttactccagttcttattaatgcttgctcctcctgccacacacagacaaattttaagcaggaatggtttcaaatccaactctgttactagaacagacttgacataggttaggcacccaataaatatttcttgaataaatagcagtgacaggatctcaaatcttaacttttagatggtgccgataccctggggataatataatcaaactaaccgtctctgcgcagcctggataaaaccatgcaaaacgaaaggtatcagcttgttttcaaacatcacaaaaccattctgaagaagcaaaccaggttggatgagtccaatgactgatatgtgttcctatgacttctcctacacctgcttcctggcgtgcccatcctgggacactggcgagtctgctcactgacactggcacgggcctgtctgtacagtcacagacggattttgctccctccgaccttcctggactcctgaacccgatcaagatgcatctgcctcagctcccaccatcatggcaccgtgtctcgtcactgctgagtaacgacttcacaacgagaagtagcactctttcagagtggtggccctgcagccagcctgccagggtgtgtattctgtttctgccttttgccagctgcatgaccctgggggagcaacttacttctgtgcctcagtttccttagccataaaataaggacagtagtaatacctactccatgagattgtggcaattattaataaacataaacaagctgcaacagtgcctgcatagagtaaggccttaatatttgttagctcctattaatgttattattattattatcatctgatttcataggtgctttcagaagatattaccttaattagaagaaattgctctactgaacgaattttgcacatcttgattggctgatggagaagatattttagtagaggtatgataataccagcttgtcctttaatcatttctgtttaaggctcgtctgctttatgagtgggtggggggatcttggtgtcaattagttatcttttggagattttctgtacagtttaaaagtatatctcctcgaggatatgttttggatgatctttattaacacagatacaaaaaggagtattatacaaattatttacttaggcaccactgttttcaatattaacactagcgctgttgctgctactattatatcttttattaacagctgtcattgagtgcttgctctagcctagtctatggtaattccctagtcttaccataacctataaattaagggttaattagtattctcatttctttgttcggactcacagaaaagtttagatgaatgtctcatcacatagtaaatgatgcctggattaaaatctacagcttatccttaaagtttgtgcttttagcactacattgttctatggagaagtcaaaaagagaagcacatttctcctgttaacagactaatacatgtaaacagaaggatgctatgagagaattctacacacatggaaagttttacttcctgaaagtctggataataaaagttggctaatacactttctgaaatgataaattaagttttagtgaaaatgaatattgagttgcaaagaaatagacattgcttaaaattaagataactattccctgccaaagcaaattataattgacaattatctgaagaggttttacacatgtaaataaagtaaatctaagtgcaaaaagatctaatatgaaaaatatttctttgaaacctaaacatgctttaagtcctgaagtagtctgcaatgtcttaaatgataactgacccctcaatgatttcccataaacatctagaagaaaaaaaaaaatttagaacatgatttctggatgaaagatctgtatatgcatatttacatttaaaaatacctagacatttgctgatgaatttagtagggttttaaattggaaaatggtttctttctcctttcccttcctgcttggaaactaagaaagcattaggtcatataagaagcccaaaccaaaggagttagggtctctacgatacgcatgtattaatacgaagagactgagaagcttaaggtaccactctgcagtctgaggactgagaggccgctgcaactgcagatttttgtctctcttgctgaagaggtatctttgcagtctctggagaaagctcaggtagctgtttgtggctttcaagatcctgtcctgaaaggggagctatctgaatggaaagagatgctgtgtgtgtctcaggcactggattaggggtcagtgagcggggccttttgagaaatgacggtacttcgacagatttggagaactgtggagtactaatggggctgctacttcctagatcctggttatgggttagtttcaaggtagaaatcctccgagtttgagaatcttgcctgtagtcctcttgtagaactggggtgttgatgttagcgaatggtgcaggatccgtgctggaagctgctggtagtggattagtgattttttgtgtatatgacatggttgtgttagattcttcagaatatacaattgtctgtctcgaatcttcattggaatacatagttccctgaagaggttttttgttagcaaagtactctgtactggagggaatttgtgtgttagttactaactggtctaaaatgacaccctttgtgtgactggttatcaaagagctatgaaagctctcttttctttctggtggagggggtgcctggattgacaatgggatccagagaaagaaataaagttgaaagaaaaacagagaaagtccaagttagtcatgaaagaaaccagtgtcaaccttgcctttacagaagtaaagcaatgccacaccttctgattatgctatccattttgttagctagattgagtgatcattttcattccatttagaatgcacttatgtttattatcaatgtttgcccttggggaaaaaagtgttgccagagaatacattataacatttgctccatctacattcagggaaattatgttaaaagtgaacatatgttctcttggcatattttattagactttgacatatatatatatagtttatttaatagcattgttttataacaattttcatgcttgtggcacaattttactaatatctccaacacagagcccttttagttaatataatagttgcatactcatagttattgaatacataatgtattgctgacctcatcagtttaaatccaaagcatcagctgtcagcttttaaagaattagaatatatcctagagattatgttaaaaaccgacatactttgataagcttaatcagaaacaaaaccaaaccaaacccttgtttgttaaaatttgttctccatgttgtaaatacaaacctggcaagcaaactaaatacaaaagcaaaaacatattaaaaataaaacgtattgaaatacgcacattaggaaagaggctgtaagcagtggtctaataatcatgccttaaaataatgcagtagccaagagtgtgcagggttacctgagttggtgatcttttatcttgtaggtttggtcgaacgcttctaaaaccttttgctgcaagagaggaatatgtagcatctccgttcagtgtctcctgattgccatcattgtaagatctccaagctttcattaagggaaaacaattggatacaaaaatatctacgttcacttaaacattttttataaaatttatttttatttccaaaatcatttttatttccaaaattgtagtgttcttactagaggtttaatttaatatgcataacagtacatgaaatttaaatttaacatgaagtcagcgatgtggctatgaatatgttttctaaaagtcacaaataatataataattattcagaatattttttctgtacctgagtctggtgactgagaatcacgccctgaaagaaaaaaaaatgttgaaattaagactaaggtgaaataaatgaacaacccagtaaaaataacatggcaaagaactatatgcattgtttttgcaaacattatttcagttttaaaatctgggtatgtcaaacatgccaaagggaggcttgtacatttatttttacttcaattagaatgtcattcattaaatatctataatatataaatatctatatagtaaacactcatttttcccctcaataatgttgcaacatgcaattttaatcttattatggcaaagatgaatatatgaatttctaaatatcaaattaaaggatcaaaagagatctggtttataaacagcactaactcaaactgccagatccttagcttccaatgccctgctgttgataagcatatttaactcctgtgttacagaactgtattctgtagttcgcatttttttttaccttaagaaactgtagacctgtctaccatatcatgtgacattttcaaattattctcgagactgagtttttttcctattgcaatataaaagtcattttatactcaaatatgaaaaaactgttacaacatgttccactgtctttcagctagtaagctgtggaaaataaatttcaggactaataaattgcttttggtaaggcagttggcaagttatcagtgatatatttgttatcaattttattgaagttatatattccaaaatcttctatatgcacatttgaggtaatcagtttgcacgtttaactcatgtgtattttaagtcatcagcttgtgttgcctggtttattaaagcacatggtcaactttacttagattcattaagctttaactttggaggtgatcctaggggttggatcattagcccaacctgctgtccagtcctggattccttctacgtgttccccaggaccattattagattcccatttcaattcataaaacaggaattttacatgctggaaaagtctttgtttttcttttagtgcttcagcacagttattttcaagtttaaacacatgaacttagaatgataaaaatgggctgagaaatgcgagcatctgatttttagataaaatatttgatatgggttctttccaaatcaaaggaaggaacacaaatgtgagtcagcacagagtacattagaatgattccagctcaggtgagctagagaagactaatgaattcccattctttatgatcattgataacttggtatggattttatctccaatgaatttaaaattggagtaataaaatgggtaccatagagaaaaattactttgaagaattatgcatgaaatgtttattggaccctacttctagaatttgtacaattttttgatttttattttattttttaaagatggggtcttgctattttgtccaggctgtccttgaaatagtgggctcaagagatcctacagcctcagtctgttggttagctgggactacaggtatgtgccactgggcctggcccttcttctaggatttgatggaagcagaaatgattgaaattcttaatcagctatatgatgaagataaagaaaaatacagtttgacaaaaaatacagagcaatcatcagaatgctgctttagggcactcaggagagagatttaataaccatgaggctgccatccactgtggacaatgaacaaattttgggatttgggaaaggacaacgaaaagcaaattttggaatttgggaaaaagcaataaaatagcccaatgctactttatgaaaagagaagcagcattaataacaatgattatattctgatttttttcttgaggatagggagtttcttttatgcttggtttggtaaaactgagataaaaaagaaggctgtgtgttagcgctggggacgaggtaatgggacccagaggcttggaggtgcaagggtgcaggtgcggtgagaaagaagaaggtgtactgggcgggtctgaaggacactagaaataaactccctctaaatgatagtctgtagggggcaggctctgtttcttcacgctggtcaccgtgttgaagatgaggagccccaggagacggtaagtgtgagaatcagaggacagtcactccaggctcaactgtgggtttcttcctgggacactgggcccagggatttccaaatgaatctgtccctgtgccactggaaacattagacagtaagaggggtgggctgttctgaagggtcttgcatcgcacagtggacacgagtgtgcagaattaagagaaaggagaaaatggccattgagtcgaacttcaggatgaaccagtattttaataaagcttatgttgatgattaaagtctgccttgaagtggctggtctctcaaggagactaaagtacattcatttctctttctttaaaataaatccaattacagatacttggaacacccagtcctgatttgctcttttattatagtcttctatgtggacactttttagcatagccctgcttttattttatccctgcaggaaagactaggagagggaggacacctgttctttggagcaggtaatagaaagtatcatggatccacatcaagtaaagagaatataggttagaaaaaaaaaaaaaagtcgcccaggtaaatggcttggcagatgtgtggggaaaatggatttccccagatctgcagcattattggtgcacattcacttgtgaaaaaaacacaaagctaggactaggggccagagtccttaatttctagtgttctttagtagacagtcactgcttcactgaaaatccacgaatgactaaatggtgtaagttttcccctttcctggctgttttgcatgtgaatattttaacaaatagggtcttgaagaatgaagagctccacgtgctcttaccagcccttttccttgtgtcgaggcacaaactggtgagtctctgtctgagattttgtgcaagacattcccggttccatgtcaggggtggaactggatgccctccatggccctttccactgttatcattctaacatgacagctttcgtgtagctgtgtttgtgatacgtgtcacatcgtaatctctactctcaggttttatttaaatcccttttaactgatatgctctattgacactatcactatatttttcttgaaaattattattttgatgcctataactcatttctttagaagactcaagtgctttttaagaattattttaaaatgttgattaaattcaggtcaactaattgagtgcctactgtgtttctatgtacaattataacccttttcatttattttcttcatttattctcatttattctgacaaatccttgtgagtctgggaaacgattaagctttcagagaggtaagaaatgacaaacaatttttcattggaaagaaaggaaatgagatctagacagactaattttcttaagggcatgaaacatgcaggtggtatcgacaagaccctgtctcttggcggagtggtccccatactgcggcattcctttaggctgacaaggggttttggtgaaataaaatgttttcaattgtttctcaatagtcattgtcttggttttggcataggtttaaaatatccgtgtgtgctctgatggattgtccagtgggaatttacttcttataaaaggaaaagagaaagacagactgactcaggggacaaataggtggtgactcagattgactgtctgatcagagaagggagtgaaaatggcttgggaccttttctggaggttttacataaaggctgttgtattttaacaatatcgaaggcaataaatatttatcaattcccttttgattcacatatagacactgtatcatataagttcttatgaaagctacatagaatgcagttgtgcatattaatgctaacttctttattcaaaaatataatggaagcttctttgaaaaagggggccaggtgtagtggctcaggcctgtaatcccagcactttcggaggctgaggcgggcggatcacttgaggtcaggagtttgagaccagcctggccaacatggtgaaaccaggtctctactaaaaaaaatacaaaaattagccaggcatggtggcaggcacctgtaatcgcagctactcaggagcctaaggcaggagaatgcttgaacctgggaggcagaggttgcagtgagccaagatcgtgccacagcactgcagcctgggcacagagcaagacccacccgtctcaaaaaaaaaaaaaaagaaaagaaaagaaaaagaaaaagggatcttactttacgtctaattgacacaaaagagggctgtttttaaacaattatgtccaaaattcagtggacttcattctctagaaatcatatgcctagtgatagaaaacttaaaatagcccaaagctacattgttattactgaagattatttcatattcctaaagtgtgaaatgttttttttttcttttttgctgttgtaattccgaagcattaaatcttttctatgaagtcgagttatatgaaattgcatgtagttcagtttcgactctccacatgggcactgtggaagcagtgtggcgttccctggtacgtgcgtcaaggttcacgtctgagtaggttggactgagatcctatttggttgaaatgtcaatgacattcagggtattggcattccaattacacgatggccctgaactcttacggttattgtcttacttgccttcattcctgtttctcatggtatccaaggtaaatacatctgtagtttttctaacacctttttatgttcatacgtgcatgagccactacatacaaatagagatttgtatagagatttttttttaaccaaaatgaggtcatactataaaccttgcaatgcatcttgcattttcttttaacttaatatataactgaactcactagcctggcatttaaacttggacgttgaaatccatttgtggattagaggtggtgaacggaagtgggattctgcatatggaagttcatttttttttctcaagaaaaactcagtagtttagaattaagtggctgtaaagcgaagaacaccctgagtatttaatcaacttctagatgtatgtgtgtagaagactgtgatatgcataatgagaattaaaattatttaaagatgccccatccctttctcacttctgctgtaagacccattaatcttataaataaaaaacaagcagtccccaaactgcagctaaccaaccagccaaccaaccaaccaacccaccaaccaacccatcaccaacaggtgtgggtctatttcagggtctggaggcactgggcttgctggcctccctttgaccttctaacagctgcaccccctcccagtgcagactgtgccttaggtactgtgcctaacttcggtactgtggcttaggtagtcacaacagagatttattaaaaagagaccacctgagtggatgctgaaatctcgcacccccagtgacttcctatctgtgggtacatgtgaatcttaattggtcaagattttggtatgtttaaatatatatagtagaagggtatttgctgattggattaaaggaaagcaaaggtctctttcaaaactaatgttctatcattctgttcacaacctttgacaaagaatccagttaatgaagattcagtttcctacaaatcccttttttcatcctgtacccctgtacccctaccccaaaagtttttaggttaaaaaaaaaaaccccaaaacctctgagttatcttaatgaaatattatgctacttaagttcatgagataacaaaaacgtgaatagttattaacactcgcagttactcaacctatttttggcaagtgactgctgtttttaattacacatttaaaatgtttcctacaagatctcattttcctttgctttttacgtttagaacaaaaacagtcagaagagctagaagccattcaagtgcgacattgtgtgagttagtgatattatacctgcagccaataggtttggagaactttgcactctcttcacagatgttagcgtaacagacatggcggcacgtttgcgagcacacccaccgctatctggaagcaaaaaaatgatatagcagaggccaaggcaacgggaaaagcacgtgcaatatcatgcgttttaagagaaatgtgccagacatccatgagaaagatgaacagttagaattagtaatcatggaatgcacctgccaatttcacaccaccctcaaactaaaacaaacaaaacgaaacaaaacaaaagaagaccagggatctgtcttagaaataggtatcactgttttagtgaaagcatggaagacttaatacttaacattttatggttttctttgtgaaaactcaggcacagaactcaactttgtttataccatttaaattcaatttatactaaatctataagcactggatctggcttttagagtcaaggattagctccatgtcaggattaaaggctatggtacaacatacttttaagttaatatcatttaagttttaccatcttctagctgttataattcccaaagagagcttgaataattcttgcagtaaaaattattagtgacacaggtatgatacatttttttaggattcatagaggaacacatggcatcatggaaagtccactcttcctgtagttagtgttagttatgcaaataactagccttattaaaataaaagtattgatatatatggtatcgaaatgaccatgtttaaagaaaggagtatattgcttttactttttaaatttttatttttagggccggagtcttgctccatcacccaggctggagtgcagtggtaccatcacagctcattgccatctcaacctcctgcgctcaagcaatcctcctgcctcagtctcctgagtagctaggaccacaggcacacaccggctaacgttttaactttttgtagagatgtggtcttgctgtgttccccaggctggtctcaaactccctggctcaagggctctttccgcctcggcctcccattacaagcatgagccaccgcacctggcctcatttattgcttttatacttttaacaatatgtgtactatgattcatatctttaaacttatgcaagtcataatgtgaaataaaatcagtgtaagttcatcagccattttaatgtgctatgagaagtttagacttctaaatttggaagagaagtcttttaaaattggaaggccaatgttctatttatgaccagattcaaattccattcttacattcctctgtaatatggcatggcaataaatagttttgctcattctcctcattctgcttattgagtaaaaccaaattaaattaaatctttttgaaagttataaaaaaagacaatataaccaccgatataataatataatcattatatattgtcacatttccatttttcctttttctttattttcataaggaaagtatcaagtttgtttattggacatgacagaatttagattggtaaagatgctcggaagtataatttgaaggaatttttcataaaatttataaatagtaagattaatagaacttaaaagcagtggagtgattcttacttcacttttttaaagtatatgtttaaagtaacaatttcttaatgtagaaaatcattaaaccagaaaaccaacttgaaagaatattaaaagaaaatgaaccaaataaatcaaaggttataattaagaacccaaagaaagtgacacaaatgggagaaacaactgaagattccttcaggaaaggctccaaaaggattttagcgaactcagcaaactgaaagtgcttagagacaagtgcgtctgataagatggaggtgatgttattgcttccaggagctggaaactggttgaaatggttgtgtagtcaaaggtgttgaaagtaaaaactgacatcactctaagagtgattttatttcctagttctgttaattctgaacatctcacaagcacataggtgaaaagagaaaattccagaatgagaagatccagggtcacaggttaaatctctggtgttcaaactgtgggctgcgatgccctgggctgcactggtgcattcatgagggtgttggggggtagttcctgtttttaaggaaaacacagtgctaactgttggacactcaatgaactacttgcttggggcagtgcctggtttcaacataatagacgcgctatattccttttgatgacatcatattttggaaaaactgggattttgatacttgctatgataaaaagcaagtaccatctgaagaacattttatttatttatgtttagagacagggtcttgctctgttgcccaggctggagtgtagtgatgcatttggaccttactgggctcaaactgatcctcctacctcagcttccctcatagctgggattacaggcacatgccaccacgcccagctaatttttaaaatttttacagggatagggtctcactatgttgcccaggcttgtctccaacacctggggtcaagcgatcctcctggctcagcctcccaaaatgctggaattacaggcgtgagccaccgtgactgtctggcctgtaaatcattttagatcagtaaatgagagtggtcatgtacaatcgaattctaaggtctgagaaatttttcagtgtgcaacaggcacacacataatattagtaagtaattcttgttataaagaaagaaataaaactattttctttcaatttatgtgtactgttctgtcaaatggcttctaagttgttagaacaaagtatttataaagtaattattaagttattaagttgttagcacctaactacttaataaatagaagtgttacatatttttgacctaggagcacagtgaagaaattactgagacattaaaggtcactgtaaaacaagaaagtttgggaatccttgggttagacaatttatgtattttaggaagctctaagtcttagatgaaataaatggaggctctgtctttaataaagtttaataaagggctgaattctaaaacttgaggcatttgtaaaattgctggaacagaatgatctattatattgtgtttctacttccttttgtattgatactttctgatactccttgaagatatttttaagatcttaaaacaaggatgctacctttcatgtgtcagtttatcctaaagaatcctaacgctggtcttgccttttgtcctcattaatgacctgcagccttgctaggctactcttcccctgagctgcaagattcctggaagctgttcctactgctggaaacccctcatatgggtaaattatagatggataattatttgatgtctttccttctctcctttcttcaatagctaagatatgcctaagaaagtaatgtgttaaacattctaaaagtggacatataacatgttttgtatatattttctacattgtttagacactttagtatgaaaaattaaccacattccccatggctagtttattatgcactgattaaaagcaaatacttaacttaaaagaatgctttttagccgtggtgaccaacacatgaagatttaaataggaatatatatttttaatgattgatatattggatagatatatctatcaataaagagatatattcctgtttaaatgaatattgatatatatatcaataaaactggcctgtattatttatctatatagattatctgcattgtctatccatatattatctgcattatctatctgtctattgatagatagataaatagatagatagatagatagatagatagacaaaaaagtcagaagagctagaagctattttggggatgagaaaaataacttgtggggccactttattcatctatctatctatctatcatcatctgtctatctgtagatagataatgcaggccagttttattgactagctctttaggaacaaattcctacttcattttgtaaacacagtaacaatgctttcaaattcctaaggcaatatatgtgtgtatatatatacatatatatttaaaagtggtatgtttttataaaaacattataattattattttggaattttgagcaaaagttttcagtcacttttgatcaattttatgcatatgtttgaataccatattttccaatcattatacattaagtggaagttcatccaaataagcaaaataatcctatacaaattgcatcccatccagagtcaagcttactccttagaaatgagaagatgctttagaaggttacatttatgctgctaagcagtaacttgggtcaagtaccttagtgacttaaacaaatttacaaatttgtatgtgcttattttgctatgagggattgaattatatgaataggaaggttaattattgagtgtactgcccatcaacacagcatattcagtatatcatgtatgcatatccctgtcataatagtgttataataaataggaaaatcagcactcagtaaaatgaggaatactgggagttatgatccacttaagtctacagggaaatgtcttggaaggatcaggaaatatcacttcctcatgtggaacttctgctggagtgactttgtagctccaaaacatggctgatgctagtccagctgtgggctctacattctatttgctttcttctgtctcctttacctgctaatattttctacttcattccccatgtctacttctgacatctccaatcatcaagttgcctttgtgtggtgcatatgcagggttataacttctcttgattgctgagccttccttgtgtgttttgactgtctccagtatcctcatcttgcctgttgtccacatgtctgcaaggtgactgcatccccaggagcccgcccgcacagccttctctgaggccactacggcacatggcacatgacgcaaggctctgcactcgacctggggattaggtattggtcctcgccagtggctgggtaatcctccttgtagcacttgatgcaacaagagacctcaaaaaggcaaccagctggacatgagagaatatcttgggccatcctttctactctgccatggcgcgacggctcaaacaactttccagtgatcacttgtggataggaaatggtatcgtttaaacacaagttacaaaatttcaacgagaaagttgtttcttgaattactttgtattgtatatttcaaggtggggggaaggcaaaattataagccaaattatttctactgtggaaaaaagttcatatgtacaaagcatgtatcatgaacacttttacagttaaaatgtagacaatacagtttagagacacagttgttaagttatttggagatactactctcacatctacacatataatgcttataacactatgggaattgtgactataggttaattaagctgattttgtataaaactttggcactctatctgctgacttcttcaacataaagagtttatagaacaggtaagtttgaatattttcttctagagcaacttgcctttgaatttagcctatttttaagtgagagatttcaaaagtacacaaacaaacgacatactacctcttcctattgtttataggagttagttttaacatgtgattagagaaaaagggagtaggagcaagtaatagaagagaaaattctatgtttggtggctataagagtggggcacaaatacaaagaaagaaagtaatgaatctatgctatgtatctaatcagaaactcagaatcacatttaggatcagaagagtgctaaactaatgatttagggccaacatgatttttagagagcaaggctaaaagagtttaaaactaacagacagcatacctgtgttcattttcaccttggagagtttgttattaaagtcttcagttttcctgtaggaaaaaaatggtgcataattgttcactagcatgtggaagaaaatatcatgaaagtgtgtcgcatttttgtttttgatgtacctgtaagttaatatcacattatcattagtcttatttaaatcagtgtttaataaggtaggaagaatttataattctgttcatgttaaactttaattattggtcccatgctcataaaacagacatattctgtttttatgcttttgtttaatggtgagcattaatggatgaaaatggagacgttttgtgcttgtttttctttttttctttctttttttttttgagacagagtccgccactgtcgcccaggccacagtgtagtggtgcgatcttggctcactgcaatctctgcctcctgggttcaagcgattcccctgcctcagcctcccaagtagctgggattacaggcacatgccaccacacccagctaatttttttctatttttaatagagacggggtttcactatgttggtcaggctactcttgaactcctgacgtcgtgatccacctgattcggcctcccagagtgctgggattacaggcgtgagccaccgtgcccggcctgtttgtttcttttttagagagagggttgtgctctgttacccaggctggagtgcagttggtgtgattgtagttcactgtggccttaatttcccgggctcaagccatcctcccacctcagcctctcaaggtgctgggattacaggtgtgaactaccgtgcctggttgagttttccttttaaaaaattaaatttcttttacaaatatttatacaaatggtttttgttctctaagcctgaaatgattgcctgttaagtgtcctcttccagagttttaaaagtgaccctggcactttaaaatcattgccttacatgtgcaggtcagttgactaccggggaatatgtaatgaatgtaacgcatattttcaggacactgtcaagaaagatgagattcatctttctcttttttaaagacacaggaaatagatggtcactacaaaatccatctctgcattagtattgaatgctgatttttcccagtgaaatgttggatgcaaagcaattgagattaattcgctagaaacggttggcagaaaggggttgtctcagaaaaaagtttttttttttgagatgagtctcgctctgtcgcccaggctggagtgcagtggtgcgatctcggctcactgcaagctctgcctcccgggctcacgccattcttctgcctcagcctcccaagtagctgggactacaggcacccgccaccacgctcggataatttctttttgcatttttagtagagacagggtttcaccatgttagccaggatggctacgatctcctgaccttgtgatccgcccgcctcggcctcccaaagaaaaaggttttaaatattgtgtatcgttttatgacatgtgagatgacttagttctttctctggcatattctcttagcccatttatggagtttcttatttacccataccctgaaaccaaagaggaaagacacgctgataaggtagcaaatctcctaagtccaagagctccctgcaagagctgtctgaccccggccacttggcctttgctcctgagtgggcctgttgttgagtatccacaagaacccccccgcacagcacaacacactcacagcttccaggcgcatcagtactgcaacatccgaacattttcaagaattttatttattccttttggatgaatgaggataaatttgaaatgaaatcattggcatgatcacctgtcaagaaagacttttgataaataaagattttttagtctctaaaaagagcagcaaatgagcttcctggctttcttgcctttgtctgccaaggttctcaccctcttctcccttctgaccatttcctctgctcaactcacaactattattttctttcaatgtggctattggagttcacctcttttggaaagcctggctttgttcattactgatgaaaaattataataataaaatcaaaatgtgaatattagctaaatataatggtacttctctcccagtggggggaaaatgatgaaagaaaataacattaaaaatacacttaagtcctatgaaatataattataaagcaagattttatatatagatatatatgtatagtgtaatcctcgttttgctatatacacatgtatatgtgcacacatacacacacacacgtatatttgcctagattgaattactaataccttaggactcaataaatgctaaattaatgaacatttaaaataggtaaaatcacagtactgataatcacctcagtatatgtttttagagctctacgctgaaaacaatatagacgatatccttactatatggtgtttaatttttgtgtggtctgtgttcagtgtcatatcgttgtccgtctgccctgggcatcattgcagtgtagggagcagggcaggagccatgcttagcgtggccaggctagaactgagtttccacagggttatggggaacttcactggggcatttcataggccaacagactctgaaaaatgattgagggaaattttatgatggtgaattttatctcctatttttcagtgtatgcaactaaacaggcacatttctgttttacttttttgttttgttcttctccagaattacacagaaaaaatgtggcgtatttctaaaaactcagcttggtagccttaagaccgcctgtattgagggataccgatgaagtcagggaagagggcagcggccagcacaggagctttgggaaagctccttcaaacgtatttagtttaatctctcggtagctcttggtagcaaaactcctaatatgttaaccttaaatggacaaaataaatggaaaagaaaagcctcaggggatgtctgtgactgagactgaggcaacttctaaaacaagaagggataaacaacctccagaaaatgaggattatgaggacctttcccaaattcgacttcttcattccttttgaaaccaggcaacgctgtgcttacaactgcttaaggttttaaaacggaatgaggaagacagtattcgggctagaataatagtgattgacaaagaaaacatcaaatacagaaggttaactctcagaatacaaaatctgctgacagacaataataatgtttttgtaccaagttagagaactagttatcaacacctattgtttgaattcaaatgccgatatttacagaatatctaacactcaaaaagtaaaataggattaacgagaacaaagaaaggcgccacaaatccttgaggttttcatctttaaagtgatgtatcctgttacttataaatgtaatttgtgaggctttttaacttcccattgttttagatgtcaaaatgtgaaatgactaacttcctaatcaagcaagacattttccaagtcgttaaaagaagaatcccagtgattgagctctcaagaagaacctgaaaccgaaaggcttcttgggtgactaataaaaatgcacgattctatttcccttatttgtgctaagtccattaacaaatccacgactgagaactctctttagacagttcaaactaaagcgaatctaatctcttttgttctgctctgaaaaagtgtccttgattgtacttacataacaagcacagattattctggaaagcatcaaattcctagagtctttgcatgctgctagacaacagcatctcaagtattctcttaacttggaattgaaccagggacgagactatgagaactgaccataacatggagactaccttgagccttagcagacaatccacggagcaaagaagtctccgaacatgaaggtgtcagcatgattttcaataggtgctaggggattgtgtttacttttgtcaaagtttcatataaaaagcaacttcatatgtgtcctaatttgtgacaacaatggattggttttacttatggattagagtagcctccactgtcaaaatacatatggcaatagattgtgttgattgttcatggaagggctgtaaacagcatgacttcgggtctatagtcttttaattttgcttgaatttcttttttttctttttctttttccttttctttcttttcttttcttttttttgagacggagtctcactctgccgcccaggctagagggcagtggcatgatctcggctcactacaacctccacctcctgggttcaaaggattctcctgcctcagccttctgagtagctggaattacaggcgtgcaccatcacgcctggctaatttttgtatttttagtagagacggggttttaccatgttggtcaggctggtctcaaactcctgaccttgtgatcctcccgcctcagcctcccaaagtgctgggattacagatgtgagccaccacgcctggccaattctgcttgaatttctttggattatcagacatctcatttttctcggaatcagagcaggctgtgttctcaatacgtataagagaatagaatgggtaatttaacttttgaaagaggatcctaaggagtttgatcctgcatgggcatgaacatgcctttgtgcctgttgtctcataattctgcttgaattgttttgattatcaggcatcccattctgaagagcagcagagacaaaatcctttccccagttttggctaagaattctatgtaggtcattttatttttgtagacctgaatttaagcaccaagaccatgtatgaaactacaggactgaattttagctcagttaatgggaggagttgcccaaaagattttccacagacgaaccttaagccaatacattgctactgttattttgaaattaacatattcacagttcatatattattcaaaaaaggacatattgatgtttaagtagtaggaaaacattgcaggatgttagtttttttttttaaagagatgtattttaaacatgaacataaaaatacaatcatattaaggttatgcaccagattttaacttgaatttacttatttattttgaaatgggatcatttgtagcactctctttggataaactgccctaagtgatcaatgtattaatgcatctctctctatctctgactgtggtaaaataagaagtattcataaatgccaagtgatttcacttttctattatagtcaaatgacttaattcaggttgacatttatcttcacctatctttcctatatgtcaacatgctgctttgaaatagtcacatgaaaactccaagtagtttgttttgtgagtttagaaactctcttctgactagtttctctaaattggctcagagactcctctgcctgagtgggtggcacacaagtcaacagtagcggcatgactgtccatgctcataagaacaccaagtacctcccagaactcctgtgctaacagtgcctgaaaatgttccttattattcaggagccgaattacccgcggcatctatttatctatgctgaggccagaacacattcaacatcatttctaggaataaggagacattattaccacaaataataaagaaataaatgaacatgaggccgttgataattttttatgagaatacgcggagtgttagttttaattagaccaaatgtcctgatatttggaaaaatttcctgaaaaaagagcactatatgtcttccaaggaaactagcaattttccttttgagactttacaatgtaagctgttcaaaatacttatcaattttccctaaagactttactgattagaagttgatcacctggtaaatgattccttctgatgttattccaaggtctcaaagttggtgaatcactcatttcactatttgctttaaatggtcatgtgacttaacattggtccagcaccttactttcttttttttctttaggtggaatctcactctgttgcccaggctggagtgcaatgatgcgatcttgcccactgcaacctctgcctcccggggtcaagtgattctcctgcctcagcctcccgagtagctgggattacaggcatgcaccaccatgccgtatttttagtagagacagggtttcaccatgttggccaggctggtctcgaactcctgacctcaagtgatccacccgcctcggcctcccaaagtgctaggattacaggtgtgagtcactgtgcctagccaccctactttcatggagttccttagttttatattgtaatcttagggatcattacggaacaacatctaagtattttcaagtgcatcttttttctaagactaagtcatttgttcaacttgatagtacagtattaggagaattccattggcttataatgtgcaaatcaaaagccaaaaaaatttctaatgaaaataattcagattctgactgaggatctcataagtcaggcaccttatcaaagagacatgtgaggaattaattagaatatccctataacacatgtataggcaaactgaatagcgttggaagaatgggtcaagaaataggcaaagcttgactcaaatcccagttctgcccatttctatgcatccgaacaatttataccaatgtcattatcatcgactcccccgctagacagcaaagcatccccaatctggcaaactggcattattcccattcactaatatttcaaatattttgaagcagatctttacctttgattgagtcttaagaagataatctagactttcctgaaaatacatggggcattattgtattgctttagattgaagcaagccatatggtttattagactgatttctatggattttcccgtctcccaattgtcccacacccagcttagcaacatgttggaattgaaaaggaattctactttccaggcagctttctttcttccttaaaaagatcctttatttagctaagattttcccccccacacattgccatgaacaagagaaaacctaagaaaatagttgaatcaaacccttgccttctagcccagctatagacaatgctactggatctaagggaaagtgacactataaaggttttgacgattagcttttttaaaaaaatcattctctttccctttgacagctgatagccgaaagcgatggctgaatggaaagagatgtctataaaatgtcacataacaaattgtgtgacaaattgcagagtgataacatcctgatggcagcctactcctgcttaattcaataagggaaagtgcctctgatttcccaccttgtactgagaagcacacatttctattttgaggagaaaagccttgatctttttaaagaaccattttttaaaattttatgctttgctaagtttctcactgcttttaattttaaaatcttccgttttaatttttatatattgaaatataaaaatcatctgatatcaaaagaattatgtaatctagtctagttttgcatgtctcatacttagactttaagtagaagcaagcatcaaaggctctggtagggattgagatcaaccaactcatttttagggttagacatttgaggataagataaatggatgccccaagcagatactcaaaagtagttcatctctcctgactcctagcaaataataggcatcctcctttaaggaatcttaaaacgtcatttgaaatcaagatcttggccaggcgcagtggctcacgcctgtaatcccagcactttgggaggccgaggcaggagggtcacttgaggtcaggagttcgagaccagcctggccaacatgacgaaacccctgcctctactaaaattcaaaaattagccgggcatggtggcacatgcctgtagtcccagctacgtgggaggctgaggcaggagaatggcttgaagctgggaggtggaggttgcagtgagtcgaaggttgcagtgagccgagatcgcaccattgcactccagcctgggtgacagagcaagactccatctcaaaaaaatgaaacaaaacaaaacaaaacacaaaacagaaaaacaacataggaaatcaagctctttccctttaaaatattacagtaccctgcttaattaagtactgaatcatatgaggcaggggttagggaaaagaacaaaatatgagaagacggtgtggtagaaggcaaaactgtttgataaataaaataagaactgttaacatagaaccatatgtttcttcctctaagactaataggaaaacagtggttgattatgacaaggattccttttgcccaatcacagcacaagtccaaatggaaagtgttaatcaggtctactaaacccaaagcatattagacctccttggtctaagcctagaccaatagccattgattttttttttctgaaatccttagaattttcagttagtaagtatatctattttaaattattttcatggtaatgttacgtggtgaaagtattacagtgaaataagcctgcttattgttaattcactgttcttaaaaagccacacttttcttctgattgaatacacctgtttcctgagcacctgaaataacatttatatactttagcaatgtcaaggtttgtcagaatttttgacagaatatactgtcagaattattacaaattcatgtttatatgtgtctcagatatgcaatggtgaaatcccacttgctatgtggaatttaaattttggggcaggggaaaatttgctctaatttgatcttatagtcttaaaatttaagtaatacattacttacaaagtttatccagaatgaaatgtaccttttttttttttttttttttgagacagagtctcgctctgttggccagggtggagtgcagtggtgcaatctcggctcaccgcagcctccacctcccaggttcgagcaattctcctgcctcatcctgcagagtagctggggttaccggtgtgtgccatcatgccaggctaattgtagtatttttagtagaaatggggtttcaccatgttggccacactggtctcgaactcttgacctcaggtaatctgcccgccttggtctcccaaagtgctgggattatgggtgtgagcctccatgcctggccagaatgtatcttaaattgtacatcttaaggcagtttgattcattttagaaaatttgaacgagaaaataataagccaatggaggaaaaatatcatctgaagaaattttgaatgcattaaaagttggaaacttttgatatttgtgttgaacagtggatagtttattacattattctttgggatctaataaaagtagacaataaagacagatatcttccattttaatggaaatgtattattcagaaatgtattattaatatttatatactgctgctccattgttattcagacatttgaaaaaattctttacatttctctatgtactaaatgtacaagtgttaagcagaatcataggtgaataaaaggtactcaatttgaggagtaccctgttccgactgtgtctgcaacatttttattttagggaaaaacaaagtggtgtgtttattgattctgcagaaggcatacacacgagaggggaataggtaataagtagaaagatgatcttgacaggctgaattaaatttggctaaactaaatttcatgattaggttgaagagactggcttttcaaaaatttatatggaataagtctaagggctttaatgcaattgttgaaaaatataattaaatcaatgtctaaatgaacagtggtttcatgaatcaaggaagattgggctccagctgcctcacttttaaagtgtccacatgagtctgtgcgtgagtcaggctggcatgaacttgagtctctaggcaggctttggaggctgtgctgggtggggggagggtcacagaacgatatggtagagacactatggtgagtttccaggtgactaccagcagcaacaggaaaagttactgacatgtacttgaggtttatttttttctttcatctcgtggaactcatcccagtggcccttagggttaatgctcttaaatataccaaatttatgctttaaattgacaagaagatgtataaataacagttgcagctagaagcttcaatattccctcaagatgtacctgaatttaagaaacataatatctaaataagactgtttctcagtgctgggtttttaaccatctggttcacaattgtcatcagaaagaatgaaaacaagtccatcctagaaataaggggtttaagacttcagaactgtacaacaaaatgggatgtggtgtctattgcccttttgttcagcaaaatgccaactcagatgacctcacttctagttcttaccccccacatatgttcccagcattcttcatttttcatacctaatatagtccttcatgctctgccactatttaaagctaaaactttcactcaatccaccaaaaataggcaagaaaaacaacatacaaatacaaatttatattccacagttacacagtggagaacagtgaagcttatttgaacaaagtttttgttgtttcataatactctaacttatttgacgtactggctaaaggtagaaatgatcagaacactttttgagattgttagttggcatattttaacatatgtagtgaaatcctactcagtctgatctttattagccatttctcccccttttatctacagaaataaactctcaacactctttcttttatcttggacttttgccactcttggaaaagcagaaaaatttccttttgacttcccaactacacgaactctttcagggcagcctggttttagctccagggtagtctgccatgatgctcagggccatggatcaccttacagatccaacctgggcctcttgttcgcatcgactctaccctgggactcagcctgttctccttcaggtccacaggtagagaatgtctgtgtggacatcttcatggacagagatacccactgacttctgatctgatacctactgacttcatttccatttcttcttttataatggagcgtaaaagcactttgtcatctgtgctgcagcatttggtaaaggaaatccagaacccacgctgggaccacatgcatttacattgattctagttaattatgtttgagtggagtgatcgcttttctatagtacatagaaaatgttaacatgaactattattattgggatgttggctgtctgccattcctaacacagagcagagggtaagaaaatgtcactcatattgggagagggcaaacaataatggatgggccaaaaagttagcaaatttctttcttttttttttttttagacggagtcttgctctgttgccaggctggagtgcaagtggcgtgatctcagctcactgcaacctctgtctcccaggttcaagtgattcccctgcctcagcctcctgagtagctgggactacaggcacgtgccagcacgcccagctaattttttgtattttagtagagacggggtttcaccatgttggccaggatggtctagatctcctgacctcctgatccacccacctcggcctcccaaagtgctaggattacaggtgtgagccactgtgctgggccgcaaatttcttttttgtgggagaagccactttagaagtatatatctacataccttgtctaagtcaatgtgttgctataaaggaatacctgaggctgggtaatctatacagaaaagagggttatttggctctcggttctgcagcctgcacgggacgcatggcactgacatttgcttgggttttagagaggcctcatgatgcttccactcctggtggaggggagaaggttaaagggagccggcgtgcagagatcccatggcgagagcagaagcaagagagagcaggaaggtgccaggctcttttcaacaatcagctctcaagggagctcccccaggaatgaatagagcaagaactcactcactctccctctgccagggaggacactaatctattcatgaagtatctggtcccaagactcaaacacctcccattaagccccatctccaattggggatcgaatttcaacatgagatttggaggaatcaaatatccagaccatagcacacatcaatagcgaggaagtggcagagtcagagttcaacaacctatgttttaggggacttccaggtatgtgctcttaatgttacatgactttttttttttttattgtactaaagtgggagtcggtgttaagccttgtgtgggaaggtatgcttgggcaaatcacttcacttcgatgagcctgagttttaaagtttataacatgaaagacttgatttaaaatataaaagcacataagggacttttatggtttgaaattttgctaaatctaggaaaggtatattcaaccaacaaacatttgttgacctttaatgtgcaaaccactatgctactgtcatgattgtacatatcaagcagaaactaactggaagccaatatttaatgactcattcacatattaaaattcagaaaaaggagatggttaaagacccgtgcttctgatagcatcatgatgagatggggtacatattaacacatgtccaagccaccatcctgacaaccaagctgtctccctctttgttgtctgctttacttaactccagatataagatctagagaattgtttatatattacatgtctttctatattatctccagtgccctacccttgagcttctcaattttagaatttgatcgttcctaaaatagaatccattttataaatctgcaccagaagaaacagacagaacttcagtccatcaattttcattaatttttaaagcttttttcatgagtagtgtggtaggtacattggaggtaacaagaatcattgattctttttttattctgttagaatttacagtagaggagaacttcaaaacaggtatctcaatcatggaggcagcttggcattccaaatattacgtttttgcatagctcctattttaaagagtaaaagtctattggcttttgaaggaaaaaaaactaaaagatctaagcagactgtactcctagccaatattctcatcacatttttcttactggctgaatcagtcatgccataacttgctaaatgacaatagcatgggaagtacaatgacaatttgagttatttttcatgtggatggttgttgttctgtgctttgattactgttgagaaatgtcggcatcaggctcacaaacaattgccaaggtcctatgacccacaaaaacttcaatcagcctgttcccatgttcagatgttttggaatttggatgtttactttacataaattatgatttaatattatggctatttgtaaggctactatgtgataattgtatcattaacttcaaatgattaagaaaagcaatctgaattagggagaagtgagttataaagtgcttgtgaaaaaaggcaacgtattttccttcaaaaatacagattaactctaggtcaaggcaataacacctaaaataaatcctccagggtcctagtttaatgaatacataagaatgatttgtacttctaacatcaattcatatggaatgaatgcttctaaaaaggtttattttgtgtagtataagtatgctagcactttgcttaagaatctagcttttaatattatcaaaagtaaagacagcctagactctcactgaattacctcaatttctaaattggtatgtctaagttacgattcagacataattcatatttatttcccatttcatgttggagtcaggatattcgcttctccccaaacctcaccccatttttccagtattcctcacctcagagaatgctatcattcattcattattttttacaattttatttatttatttttttgaaacagagtctcactctgtcgcccaggctggagtgcagtggcgtgatctcggctcactgcaacctctgcctcccaggttcaagctcttctcctgcctcagcctcctgagcagctgggatcgcaggcatgcaccatcacacctggctaatttttgcacttttagtagagatggggtttcaccatgttggctaggctagtctcgagttcctgacctcaggtgatccacccccctcggcctcccaaagtgctgggattacaggcgtgagccaccgcacctggcccattcattcattattcaattcattaatcaaaaagtttgagagcccattctactccacaaattaccctggatgttccctctccctcaactctccatgttttgagaaataagacaagaaacattcagctctgggaagggcagcatgcttctatctcagtcccacagttcatttgcccaagagacttgggcatgaaagataagcatttctagtccttttgattttgcacaggtcagatataggttaggcacaggttaacacagagtgggcagatgggagtctctgaccagctcatgcggtgcaggagttatactgttgcttcactttcccataacagcaatggatccgaaatggatgatgatgttccagtgtcacacaggtaggggcagcatggcagataaacgtgagagaaaaagcagtgtgtgcatgcacatgtgcacatacacaaacacatgtgcccatgcacaggcacacgtacacatgctgttgtgttccccacccagttgtctcaaaggccacgagtttgtggattttatcttcctagttcagtacaggactacccagaagttggtcgatattaaagcctcaaaggaatcataatatcacttttgtccagattttattttccaatcctctctttgttttatcaaaaacattttaggagtacattttttcagatggattatgtaaacactggacctgttcgttaaaaaaatttcttagagatcaagaccatcctggccaacatggtgaaaccccgtctctactaaaaatacaaaaattagctgggtgtggtggtgcgcacctgtagtcccagctacttgggaggctgaggcaggagaatcgcttgaaccgagaaagtggaagttgcagtgagccaaggtcgcgccactgtactccagcctggcgacagagcaagactccatctcaaaaaatatatataaaatcaaaaataaaaaaaaattccttaaagtttaatattgatatgttctatatgcaaacatgaatgggggttttccgttttttcactgctatacactcagcctctaacaatatctggtacatattatttacccagtgaatatttatagaaagaagatgtcctcatttacagacatgatggaatgactcccatcgtgaagtggtttgtcagggagagttagacaaaggggcttgaggattcccctcatttgccattacagtccaccccttggctcttctagtctattgagggcctttcttctgagttgctattggacatcttgaatgtaatggtgtccctagacaccagtttacattgtcttccagcatatgtcacttgaggaatctctagatgatttagaggtgtcaggctaacaaatccacactcattcctgaaaatccctggaaaatggcaaagataattgagctgatattttggcaattggcaggatgattttgtttgagtctgaagtgtattttaagaagttatttaggtttcctgaataccaacagtatcatgaaaatattatgcttgccacgttgatttaatcaatcaattctaaatcaccaaattatatcatacattttaaacaaaagcatttttactattgaaccctaaacatgaatgtgacttgtgatttttgtttttccaagagaagactaatacaaatattcattttagaaaaattctcagtacatgggctgtttgtatatatcttaccacttcatatcccaaccaaaatcagatccacaaacagcaagcaaacaaacccttgactcttttctcttttagttagttgtaatataacataagtgatattgattgtagcaatggagaatgattattgttactttgggggttgtgtctcaagtatacacaaatggataaaccacaatccttggtgcatgacaaggtcatgtacatccccctccctcctttccttccttctgtcactaaacatctacacaccaaccatctaaagccaaagatagaccttcgtaaggacctgtgtctatccagatgacttctgctgttataacatccctcagctccatgcatttgagtagccatcattctgaattccatgcttatcattctcttcctttcctgttcatataatttcattgtatttatatgtcttctaaaagcacatttattttagttgttttaatctttataatgatataatgctgcatataattacattgctaagattcatctatattgttggttatccctgtagtgtgttcacttggtctcctatataatatttaattttgtcaaaataccacattttgtacatccacttcctgttcaggggcatttgggttgcttctagatttttgctatattggagagttctgtcataaacacgtatgtacatgtttcttaatgcttttcttgtgaattaactgcttggcagataatttaaatgatatagctcctacttaaaaagtattttctatgtgccaaaaactgatctaagaatatttacagatattacatgtatattaattacatatgtgttacatatatattacatattacacatatattaattgacctgaggcctcacaacaaccaaacaagctaaatactattgttatcttattttactgcaaagaaacgccaaaccacagggaaggtacaaggtcacacagctattaagtagtgagtgaagcttgggaatgcaggcagtttggcttcagagtttttgtactataatgtctttcttggatctaaggacataaaggattgcaacagtttataacacataacttagttattgaccagaatttgagtgtgagtctgtcataatcaggattaatcaggtacagtacaccctgtaatgagcaatattggaaatgctcatgtatactataattactctaagacaaatgtcataaacatctttgttttttttttttatcatgggtacaaggcacataaatttatttcaataggacagctgctgcttttgatgcttgttctcacaattccgtggtggtagttgtatttgtttgttctcatgttcctaataaagacatacccaagactgggtaatttataaaggaaagagatttaattgactcacagttccacatggctggggaggcctcacaatcatggcagaaggcaaagggcatcttacatgacagcaggcaagagagcttgtgcaggggaattcccatttataaaaccatcagatctcatgagacttattcactaccacaagaacagcacgagaaagacgcaccccatgagtcacttacctcccaccggatccctcccatgacacgtgggattatgggagctacaattcaagatgagatttgggtggggacacagccaaaccttatcagtatttctctgtgtttctcacaaacatccctgagcactttattgttatcacccaccataggatggtcaggcccatctttcttccccttgaaggagcccaggcttctcctaggcttcagtgttaagggcacagtgggttctgggtgaccctcataaaatcagatcatgaatttaaggcagagccgacttgggctctcactctccaggggagatgttcttagatgaacaaaaattctccttagtcagaaaagcagcatcctcatcaatgtatggaattgtggcaaacatattaagcatgtcattccttaagttaatatctgtcactacataataactcacgataaataaatgtggtcaagaaactatattgtcacaggtacatgtaatagataaagacagggagcacaaccagcgtttgtttaactttgcaaggatcaaaccatcatcagaaccaccctttgtgtcttcattaattttttgttcatgctgattctgaatgtttagtctcaagaggaattatgagccatcagattggatgagtcaccttttagttataatcacaggagcattcaaaaatgaaatcactttattcagctggatgaaccttataaaaagtaaatgacttcatatacatttggcataaggctaatgagctatttttagtttttcctggaattatcttagcccttctttccgccctccgtgatgcctgcctccattttaccccttcccagtgctttcttggtcatgctaatcaaaaaggaaagggggaagaaacatgtggttttgataaccttcaaatcattaaggcaagggggaaaaggcccacaaaaggtggctctgaaacgtggagcgcctttccaagatccaaataaagtgttttctagagagtttcatgttatttttatcatgacttttataatctactactatcttttaaaatctgcattagaatattatttctggatctccaatctttatatctatttctacgtgggtatgactgtatgtgtccctcaaaaaatttcaattcagttcttgtgaaccagagaactcttcaaccttttctctttttttgagacggagtctcgctctgttgcccaggctggagtgcagtggcgggatctctgctcactgcaacctccgcctctcgggttcaagcgattctccctgcctcaacctcccaggtagctgggattacaggcatgcaccaccacacccagctaacttttgtattttttagtagagatggggttttgccatattggccaggctggtcttgaactcccgccttggcctcccaaagtgctgggattataggcatgagccgctgtgctggccaaatcttttttttttttttttttttagtaaaaggaaactaaagttacaataaagaaataaagaaacttacattttgttgacactaaatggcaggtttcatacaaagactaatcttttttattagggtaggaataattattggtgactttctctgccaattttccaagtgttggtaatacatgttgttactttttaaatgtgtttttgttacttttaaaatgaaatgaaaaagacatataaattatagcatacatgtctacccctacatttaaaacaatatattcctatgataaggcagaaaaattaacctacccttccctaacacaaacttccctttaatgcctgtggccatctgtagatcctgtcctctgttagcaaactccactcatttgctttttgaagttgagttcaagatcctcccatctcctcacctgccccgtcacccacatctctgcattactgtaggctcactgcatgtgcccttcatctgacattgaatctaggctgtcttgcaacatttctgatattactgccatttaatttaactttttatatgcattgccttttttttttttaagactagtcaagtgcagtagtgagaaggaagaaagagtggaacaaggagttcagctgtaattgactaaggtgactcactctgtggaccagcctgcattgcctttctggctacattggtaagtatgttaaggagagggacaaagtcacttgaagtttttggcctcggtttcctcatctgtaaaatgaagggaaccaggcctccgaatgttgttaatccaacacctataactctttttcccaaggttgaagatccccagtaatatttcagcttgctttcactcgatgttaatccaacacctataactcttttccccaagactgaagatccccagtaatatttcagctttgctttcactcagtgttccctgactcagagatctcaaaccctaagggagaggcagagtgtccttcagtcttgacgcctgggagctgtggatgcctcattgttgctcgtcttgcgacataaaataacagcatgctagtggccaaaaggcatgaagtgttcaaacttattcaaagttcaaagtgttcaaaccttttatgtacatgattctttaaaacgagggaaaagggaattgctctgttctcaatcgactgtgtctgagttcttaggatttatattagatccacactcccccccaaattttgaagatggaatgaatgtgttttctcctatatttaccactcaagttttttctttcctacatgctgactgtttgtgttatggtcattagattctagtactgaaggggttttggtttttgcctttgttctctgtgtgagctatgcagtggcttttgtgctgaaggagggagctcccgtctcatcagtttcagaacttgagtgatggattcgtcgtggctgctgatggtaacggtgggcactggccagcctgttgctcatgcagcgtgggaggtgagcgggcacagtgcccgtggagaggtggtgctgcctgatgagcttagggaaacccggtaaacaccgatgtgctctcccagatgcaaactgagtcacatccctgtcaggaaactgcaaataaatcgtgtgcaaaacggaacaaggatcctattaattaatttgggataactttattttattttttattttttttagagacagggtctctctccattgcccaggctggagtgccgtggtgtgattatggctcactgcagccttgactgcctggattcaagggaccctcccacctcagcctcttgagtagctgggagtacagatatacaccatcacactcagcaaatcttttcattttttttttgtagagctggggtcttgccttgttgcctgggctggtcttgaactcctggcctcccatctcagcctctcccatctcatcctcccatctcagcctctcaaagtgctgggatgacaggcatgagccactatgcctggccctgacatgagactcttaaccaggccattttacaaccaatttcatgcattctacaattaaacaagatagtaattgtgtaacagatctagacaactttttcatacagatatttattttcccaagttcaactagggctagagcggtttgtagaaatgtataggtctaaccaatgcttcagttcacatggtctcttgctgtacagcaacagccaggtgagttctaagtgtcaaagtgcccacaaaaactgcagtgtaagtgaagctaatctttggtgtctaacatatttttactgtgtattcacttcccttcatctttttgcattattttctgtctcaaagcaatctgttctacatccttccccatccaaattcccaacatatgttggggtttaggcaataatatttgaggcaatcgtagaggaatgtccaaatgtgtttgaatgaggggctgtttaacctcatgtagagctatttgaagattcagaaatgtacttctgaagcccgggtctgtctttaaaaggccagacttggtatatcagcacctattcagcacacgcacaagctgcccaacaccacactcagctgaccgtgctccccgccacctatcctctccactgatggagtttcatttttctatcaagagcatcaccattttgcttgtccagccccaaaacactgacatcatatttgactcataactcctcctactatcctcatgttggagcagatcctactgatatgaacagaagccagagaaattctaggcagaaaagggtgattccccagcaaaaccccaccctcaagctgaaaagcctgaaaccatggcccaaagtgagaacttgtatccctctttacccgctaaaatgttgcctttcctaaactacctataaccatgccccaccccatcctgtgcccataaaaaccccagacttagctggtaggtgggactacagatgaatgtcagagagaagcagcttgactttggagggacagcttgacggcgtaacttcggagaagaatccagccagagacagctggattcaaggggaagactacctacctgcccatcccctgttcagctccccttcccactgagagccactttatcggcaataaaatcccccacatttatcatccttcaatttgtttgtgcaacctcatttttcctggatgccaggcaagagctcagaagccaccagtgcaaatataaaaggctgtcacactggcctttgccctcgctggcgggggtagctgcctcatgcgaaaaggcagagggcccactaagctgttaacacttaagccgcccgtggacagcagagctagaacagcactgcaacacgccctctggggctttgggagtcacaggcacccccacctggatgctcgaacggggactgcatggagttcgctcctgccagtgccaaagcggccagcgggttccagcgctcatgcacgccagcttccactctgcttgctggtgcactccctcctgtgaggagttgagaggggcaggctgagtaaatgaggcacccccctcgcaagtgccgtgaaggggtcaggggaatatcctgcatcgctactgtctctttaaaatctctccagaacctgcacacctctcatcaccaccttctgtttaccacctaacaccttagtctagctttccagtaaccttatggtttttctcccttcctccattgacatcacctgcgttccactgttcccaaagtatccagagtgatgctcaaacatctgagagacatcaggcattctcctattcaaagccctccagtcacctcccatctcccctcctttgctggccggcagcatcctctgtgtcctgggccctcactgcacctctagctcatggctaccactcttcctctttgtcctccagcctctaatgaggctggctacctcgttaagccttggacactccaagcccacactgtcctctccctggagccccaggtctctccttgagttcttcagatttatgctccagcacctctgtatcagagacctttcctaactgccccatataaaatgcagtcctccatgtttcctttgtcttttaaaagtttttctgcagaacacttcttatcacctctcatcttacgtgtttgctttttatctctttcccaccacaaggattagctcagaagagcagagactttcatcaggagaacgtgattcagaggcaggaaatttaatcatggggtggaacctataaggacgttcagtccacgtactggcatcgtgtggctctacacagggtagttaggggaagggatgagtattacaagttgctgaaaacaatatatacttttttcctttagcaaatgcaaagaggtagtcagcttcaccacttaggcaaatgcagaaatattgctgctgtggaaaagggtgcaagagaaagtcagagtgaaacaaatcggtgctttataatttagtgagtagaatctgtaatcattactataatttaatcattactatcatttagtttcccactgtcatgatattgcagcctggtacacattaatattgccatatgttcatactgcacaccattatttgcctttgtcgttttgtgtgaaactagacaaacatcacaatctgactttggactctgaccattagcattgatttcaaacagtgctgaggcaattctgtgaaatatggaatcaccaccactacacaggatcttaaacttcaattctagaaatgggatggaacagctacccacctatccttaagtataatgaaaaaattactttcctggtgataacataaccttcattatttaagtggatatatggttgattttctatcttacatttaatttccttgggttttgttaaaattatgaatgatgaggcattgctttatcaaaataatacatttgcattttaacagattttcttccattctttctaaaggagtatctcaaataatgggaggagtcagcaggctagagtgtaggatattttgcagcagtgtcttgctttcagcttcacgtcatcccattgctccctcagccagcctctgaccctacacttggtctataccaggtttatatactgagtttcatggatacacttaggtggcattaagtagaataatggcagatgtaatgtttatataacttcacttaaatttagtttaggcttttttttttcacctcatcaacacagaaaacctataacctaaaatttgtgcagaaatgtgtttcacaacagcaattaggtatacaggtgtattaatctgttctcgcactgctaataaagacatacctgagactgggtaatttataaaggaaagaggtttaatggactcacagctccacatggctggggaggcctcaccgtcatggcagaaggcaaaggaggagcaaagtcatgtcttccatggtggcagacaagagagcatgtgcaggggaactctcctttataaaaccgtcagatctcgtagatgtattcactaccacgagaacagcttgagggaaaccacccccatgatccaattatctccacctggccccacccttgacacatggggattattacaattcaaggtgagatttgggtggggccacagagccaaaccatatcaacaggcatgctacctaaacctctcaaatcatttaaaagtttcacttatcttcagaacacatgagtctataaagaaataagcaactgtgttttgggttataagttaaaggcttgtaaatcattaaaaagaagaccactttaccatggcatttttcacgacagattttttaaaaatatcaacattttctcattaatctccatgaatttgtttgcaaagaataaatttacttaatcattagctttattctgcttttggatagcatgactaaataagttgcctaaactgaaagagtgatgttaagactaaaagtagaagttatcagtatttatgctgatgtaacaggcataaaatgggattatgccaggcaataaggcgaaaaagagatgatgtaacaaaattccttctattttgatattaatttagtctccagcaatttatagcttttctctccaagaaacaccactcctgtaccccaaggagatagtaaagttgagaaaagccctatgaaaaggccaaaggaacagacacgaaataaaaaataaaataaatatttagtttaaaaaataaaaagaaataatttaacctagaataattaagactaaagaaacatgagactgaaaatttaaaatcagaaaaaaactggtaaagttaactctatttttccctaagccctaacttaccaggattaaaagacactccattatatttcaaaattgtttttgatagaaatagattaaaaagtactttatgtagcgagtagaacatttctggaactcaacaacttgaaatacaacagaccaaaaatgtagacagaatctaaatcctttagaaatatgcaggagtgacagctccatccatgttttcctccctcgactacaagtggcttaaagacagaggtcataaaaaaagagtgaaaactactaaatgctcaatagataaataataaatcttaagtgcttaataaatgttgctggaatgtgtaacagaatattctgaaaggaaggctattcttaacagtcatgcccactgtgccatgtcctacaatgtgactgctggagagagattagaagtaacatctttttctatggcaagccacacagtcagagacctaagagaaagtagtcctcttcctcttctaataaatagaaatagacagttcctatatcatcagaggatttcatagaaaaagtatttcataacgaaggcttatgatcctgattatgggctacttttaagaactgtggcatcacctgctgctcaactcccagacagagatgggcgtggtctcccgtaacacctgctgctggggcaggctggcgaggtagtcaagagtgtagatgctggagccaagccagctttgtgaaaagcccattctaccatatccagatggatcacttcagaaagtgacttatcctctctctgaacctgcccacatttcctcctctagaaacagggataacaacggtgccaacctcctggggtggctgaaggacccagtggatgcgtatacacgaagcacttagaagtgagtctggcaggtactgccaaaaatgtgactcctgctgctattaaacaggggatgttgccttggcaccgacaggtgtgactagcggttgaaatatttcagatacggggccccttcttgccttggtccctcattcaaatgaattcacgaatcaggttttctcttgtataaatgagttttttttaagggcgtctactaaatcttggtttgaaggatgaattcttctgggctcacatttgcttctttactccacagatggtggagtaaaatctgtgttcattgcaccttccgctggtgctttaggctccaggagcagcagctccctggattgagtgggagccagttctgcctgactggtctcaccagcacaccagactgcgcaggcgggtcagaggcccacggggaggaaacatcagtggagggaggatgctgtgagcggtccacccctgcatgacagatgtccctttacagaaaagaagtgggaaacagactttggcaaagggaaacggcagagtagcaagatgattttgattactagtgacatttaattgcaattagatttttaaccacaaccaagaagatgataaagcttttccatgtattttccataaaactgtccgagcttaggacactttagtgctcattcttcctgcaacactacccaccacaggttcactgtattggaagtatactgagaagagctcgtggctggcgtgggagcgccgctgtcttcaaacctggaagtgaagtgcacccacacccagccacagcagtgattccccgggagcgaccttcagggagttgctaggagatggccgctctgtgtttcctttgattatagggcataaccctgccactgtcaaaatgccagaagaaaagggcagtgattgctggacataatttttttctgttacttcctgtgagatattgttttgcacaaagggaggagactaagggagccatggatatctctgtagcagaaacatggcaactattatctgaggaaggccgacatcctccaatagcgatcctgtgtgcaacgcgtattatttgcttcttcaaattgagtcgtatctttcagtaatttcttaagacgctagacggtattacacataggcatggggggtggcttgtggtttaaaagcagggcttacacatataggtagaagccgcatgtggtcaaaggagataaagtaccacaaactgaggagtgtagttagctgggcgccctggattgaggtaaagtagaaaaagactgtgatacttctgagcccaagacatttcactctgccacactatctcctgtatatgcagttattagatagacaattctttttccgtgacagccaatatcaggtagggcttaaaagtcacaatctgggtttacaacacaactcttctgcttattagccgcatgacctggggtgagttactttctctctctgtgccttggtttctacaactataaaaccgaaatacgttacagtaagcacttgataggatcaccgtgagaatggaatgaaatcatatatgtatggccgggcgcagtggctcacgcctgcaaccccgacactttgggaggtggaccacttgaggtcaggagttccagaacagcctggccaacatggtgcaaccccatctctactacaaatacaaaaattagctgggtgtggtggcgggcgcctataatcccagctactcgggaggctgaggcaggagaatcgcttgagcctgggagacaggcgctgtaggaagccaagatcgcgccattgcacttcagcctgggtgtcagagtgtctgtctcaaagaaaaaaaaaaagaaaatatgtaatatacttagaaaaatagctggcgcagaacaaatgattacagaaatatgagctatcattttcattattattattagcatcataaacattatttcgttgtgctctgaatgcagctgaacagtactcaagagtttcaggatcagttgtataaaattacaaaaaattagaaggtcacccatcttgagaaaagacaagtttgtataaacaggacaaactactgaaagcaggagagttcaaggaagccaagagaagctgagaaagttttcttaaatctgctgtcttgttggttgctgatcaccacctcattctccatgataggtgcacagttggcgtacaggttacctagggctggatactgattgagcatatcctgtgcacaaggacacctatgtttattccacttagaagtctgaggttgttctgaatgtcaagcaacaaaacaatgcacttctttgggagagctggggcattccagattctggtcattaactgggtgagtgtctttaggcatcattccacctttgtggacttctgctccctcgtttgcaaagtgagagagtcagacactcaggttatgttcccttaatctccacctttaaaaaaaataatgttctgatctaccttcataagagcagttgtgtgccttaattttctttgcaggtttgctctatgcagacctgtcatgtggaaactcagagttataaattagaaacaggtaaatgatttatttttgccctgcaaatgagtcacactctctacaagtggattattaaattccattaaataacaagcttgcccaataattctaaaatagaatctggttttaaaaaaaaatcggtgtacctgttctctgttgtataaagaaaggtatgtgatagcatcgttaaagtatatgttttagaaactactctggcaaataattttcttagagagaggttaccgagaaaagagaaaagaaaaatttagtttttctggcttggagaagcagcaagtaaaagtcacagctctggaaccaaagcaagaaagctccttgaagaatgaggtaatcagacttgccggtaggtactctcaaaccagcgtgaactgtacactgcaattaattattaaatgtgctcaggctaggtcaggctatactaacagaattcagacacgtttttctctccagcatttggttatcagttttgtgacatatagagtaacagttataaggatcagtttctgcaactccatccctcaacctacttttttattgtaaatagactgaatgtggggaaaaggcaaagagaaaaagtgctatgcttcaagaacatttgtcttgatattttggtggcaagcatcatcaaactaactatatttggctctgactagcttagcatgagatgttagtttttagccgcaaatgagtagcacttgacaaggtgagaaatcttccttcaattgttgaaatcatccaagacgtgtttctaatctacattttgaaaacaaaagccctagcataatgcaataggaattcttcttgcctgtataactggattctgctctagggtcttgtgggatggttattacacatggcagagaaagctacgtgtcctcttgcacccagtccctcttcttaatttataacggaagtttcagctgaacacatggctttagccaggctaagattacatttttcagtttcccttgttttatcaccaaattttgaccagtgggtgtgagaggaaatgctgtgtgcatcttccaagaggctgtggccttaaaggcaagaggtgccctctttgcttttccctttcctgctggctggaacgcagaactgatgtcaggagctggggcagccctcttgaccaccaagggaagccatgtttagcgctgagaaagacagagcaataaatggaaggagcccaggttcccagaattgtgaagcctccgtactagccttgcaccaccaatctgtacttttacatgagtgagcaatacacatcttttatgtttaacctctgttaatttgaatctctgtaacggcagctgaggttttatcgcaataaatgtattcccacagtcagaatccagacaatttcaatagttccattttatatttatgtataatcataagaagaaagtccccaattttacattaaactctgtattccttctaactgtcttgggttgagtgacacggcggctattgaacgtatttctgtggcactgtaacccagtagatcacacccatgcaattgctttctcttccttaggcccaggtcacttcacctgcacctctttaaagactgtatttcctttctgtgtccctccctccctctctccctttcttccttccttccatgtatctaagagattggcctgggcctccggtacccaggtgctctgccttgtgactccatcttatgtgaaaactgtgccaggtgctagaaaacagtttgcaaattatattttggtttggagaccttgaggatgcatttactgaattttttgactggtatttacatgatcatctcaaagaatgaattgcagttttttcacagtggaggtactgataattcaccccttgaaatgaggccgtgtgggatgagcaaccttgaaccaggaccttaaaagcttagattccagccacggctccgacacaaagtgacagccgcgtgaccgtaggcccatcgctctgtctccctgggcctcaatcttctcacccttgcattgggaatgatactaaagttcctcatccacctgcctcatgggattgctcagaggatagtgtgagacaatctaccacaaagtacaactgtgagccacttcctaactcctgctttcccacctattcttttttttttttttttttttttgagacagaatctcactctgtcgccctggctgtgatctggctcactgcaacctctgcctctcgggttcaagtgattctcctgcctcagcctcctgagtagttgggattataggtgcctgccaccacgcccagataatttttgtatttttagtagaaacggggttttgccatgttggccaggctggtctcaaactcctgaccttgggtgatccgcctgccttggcctcccaaagtgctaggattacaggcgtgagccagcatacccggtccccacctactctttaactatgacagatgtgaacgtttgatctctttgcagacaagatcagcacggtgactgggtctttgccctaccttcctaagcaaatgacagaactggtagcagaactggagcccctgaagcttctgcaggcaaacttcctggagcagcccaagaaagtcagagcccctccttttcgtcacattcagttggaattttggaaaccaagcataatggagaaataacttttttggtatagccggaagatgaacccttgggcacagtttcaaagtcaaatattttactgtaaagtggaagaagaaaatacccagatctttctgcatagtcaagtggcttatgttttgcacgcattggaaagaagggaaaacaaaagctgtcttagaagacgaaatcaatcacatgaggagtggcactgctccagagagctgaggtcttcctcttaggaattacagactttggttccgtataattaggccctgtgttgctcaacttccaaataatttagagagaattatcatgtgagagtgcacatatatacatttttttccaaaacaaccttctcaatatgtagcaaaatgtagtcaaggaagaaaaaaaatgagaagttctttagatttcagccaaaacaatcacttaagctccaagtcactatataaacaccattaatacctgttaaaaggtcgtgaattctgtaagagatgtttggaacaaacagtgcttcagaactacccacaaaaataaacaaaaaagagatcatattatgtcactgggtccagacaggatgatgaaacggctatgatcacgtataagctttatctatctttccagagaacagtgtcagggacatatgggttactttccaaattttgtttaaaaaatatgaaaaacatctgtgaaattctggtaagacaaaaagagtttctaattctttggatcgcaaaatgattcttcagttctaattagctatgataaattatgttaattctaaattattatcattcatgtgggcatttaatttaaaaagtggcattatttggaaaacagtctctgcaatttattctaatgtagtttaacacgaagcagctacattgcctttttggatattttcagaagtgtgaaaactgtgaatatcacttcaggctttgcagaatggtactctacaatgaatctgtgtctggcatctgattggtgataaaaaaaattattgggaatagattattagttattctgagacagaattttgagaaacttgttgaaagagtcttgtttgaagagcccataaggaacctcctccttcacacccatactctggctaagaatgttgactcttttttcttaattaaaggctgaatcactgataatattgttgatattaagtgcctactaaccagcagcatgagcttttaacacttttaatgtcacccaaaagcctacccaaagtgcccaggaaaataaacagttttctaagattcagtataattttattttgttttgtagctaaaatgcgccagagctgtattcatgtcatcacagtgggaagaaggcaaacatctgagaaattaataaatcccacagccgatctgagctgtcacccaaccccaaagggcctcagtatctgcatctgtatatggggataactcagttctccagagtttgtaacaggcctagcacagtgcctgcacatgtaagagctcagaaagttatttgtaaattagtaaattaatttataaaattgtaataaatcaataaccattaaaaaaaaataaaataaaataaatcccacagccactaaaagcatatcgtatttggggcacaactctggccatagaggcaagcacctgacataacacagatggcttcttgctggtagcatggtggcaacttcgctgaaaacacagagacaaggactgtttcactctgtctcccttaagaactttgaaaacagttttatgtctttggagaaggagcaccaatttagcttgcatcatggatcatatagaacagggtatgttttaatgtgctaaaacctaagcaatgtatttaacagagcaatctatttccatgaggttcgtgagaaaataattcagaggctctaagggaagttgggagaagaaaggacagcccgtaccagtgcactcaaatagccagaaagagcagagatgctgattgctccaagcagtagtctgagtcttattctattcatttccttagagtaatttccagtatttgttaaggcatacagaatttgggggcttgaggtagggagtgtgtcttatccatgcttggaaatgtaacagcttttgaagttttgtaatgtttcttttttaaagcaggcatctttctagttccactatctctgtggagttgaggaaagaaagtaattcatagacacagggcagcacgctgacctttcttcagtgaacgtcaaggtcctgggctcataagggaataaggaagaggaacctcagtatattaatccatgggctccagccacgtggcagctacatattttcaatcactttgcttacttcaaacttttcttggtgtgccatgtacattaagaacagataactaagaagcaacccttctcagtgtttttggcatctactgatcagcacctgacattccaagttatttcctcctctactcggcatgccgatttctgtactgttgaacagcaggaagtgctttcaagggtctaataaattagcctttcgttgtttcaacttccaagtgaagttaacaataaaagaagcttagtatgaaaaagatccagggtttcttaacctacctcttgtttcttattttctttcagtattggcttttttttgatgatgtttgggtgtttggggagtggaaacaccataaatttgatcttaagctgtgctgggacaacttttgcatgtttttattgaatacttgggatattccactgcccagagagttaaaaaaaaaaaaagacaaaaggatgagcagctagttaatagtcttcatagccaccagttatcctttaatctagtattttctagagtgctgtgatatttgcagaattaacccacaaaacagtatcctatgggccaaccggtgatgagactgagtttgcctttgagaactccggtgggtgttctaacctaactttcctacctctcttcactgtcatttatattgttgcctgaggactcttcctaatacctagccaaagtatggggggcctctgctgtctgagaggtcaacttctaacaatttagtgtgacctcaaggccaccccatgacctgactccattctcctttttcactctcgtcttcggccacctctctcaatttgccagactatctgctctccctggaatccaccatggacgctcatgctgtttcccgaatctggatgtagaatttccctgacctttttatttacaaaattctacccatctttcaagattttccttttcctgagttgattattctttgtttctgtgttctcaaaacactttccttgagcaatgctaaatactagtttccttcacgtctgtttctctcaccgcagcatctgtgagattaaggatagtgtctttttcaccatttatctctcactgctcctagttcagcaccttgcatatctttcatgctcagtgtacttaaaaacaaaagaatcatacataagacggtgttgccagtttatcatttaatgaagaggcttttttcttttatcaattatggtaaatctttgactagttcaaaaagggatttaggcagatctatttttgagcatttctcctgttaatatttatattgaacttcagccttttggggtcaacagctagaaaccatcacagcctgctataatccattagttacaaaaggatggaaattatcctgcaaaaagcgccaggctgcagaggttcttgtttggaattattacactgctgttggatattctaactacccacttgtgttcaaaggagaagcggcatttgagaaagcttctaaatgtgggttctgccacctaccatgtagaactctatgccagtgggtcaaacatacttgccgtctaatttagcatcccaatatagattctagcagagcttctttgacatagctaatctctctgagtttcaatttcctcacctataaacttgggagtaacgactttgtgtggcaagaaccccaagtaattaatcaaaattctaactttgtgcttggacatagggattgatcataaatgtgggctattattgtcttgatctttgtttttgctgttgttcatatagtacttattaatatggcttctaatttcaggtttgtcatttctgtcgttttaattttattttatcaaataaattatcataataatcttttcattggctctcctgtccctagttctccccctaatattgatctctctccttttaattccaagctgcaattgcaaggctaatattttgaaaggaacactgacttcacattatctattaataaattctaaaccaagcccaacacaacatgatcctaacctaattttcaagaatttattttccttctcagtttttttttgttttttagtcaaactgaactttttgttgctcctttttttgtacatttcatgttttagccttcatttgagtttaattagcacattttaaccagatgcctacattgtgtcagatattttctgggtagtaggagtgtcaggataatccaaaagaatccctgccttccaggagcccatgactggtgtggcgaggcaggtgtgattttgattcatcttttgtgagatgttttattcgttgagattacctctaattactcttaaaattacacacagttttagaagtccatctcaaaatagtcccctatgaaaaccacataaatccctctcactcatttaaactaatatagttccttttctgtgccacttcatcttgtcttactttatgttatttatgttggtgttttcttgagggcagggatcatgctttattcacatctgtgtctttcatcgtaccttatgtataacaggcttgcaataaatatgggttaaatatcaaaggaatgtaatagtacaatttgactttaaatagaataataaccaaagttttcagggaccatttttcaaaagacccattcccccaagatacttaacctacaatgcttactttgtataagctctgttacttaagctaacaaacaatagttctggaaacctcatatacagaaacataaggatatttagatgtataatatattatatatataatatattttgttacaccactagacttggcttgaatgaaccagaatattgcttgcttatttccttgatgttcttttcttacacggtttgttctacaaatgtataaatattaatatattagaaagttatagaaacagatgaaggaaaaatagacacaaatatagtatggaagcctggacataaaccagggatttcagaaatagaagctatggagatgcatccgggaggagggtctgttttagcacatttgggcatgcatctttaaataggagacacatttctggaaggaacatagggtcctgtgggtaaagtattgggttgccttgttttatatttacttgaggctattacagagaatcaactacagtgtaaagggagagcaaaaccaagcgagtttggatttagggacattaagtacgctttgaacagatcagaagccctggacagacgccaccacaaaagcagcagcatctggaagtacacgtgctcatctctttgtattgcttggtgtgatttccatggctactaaacgagtcattcacttcaacctacattgatgtgatcaaaatagtttcatcagagcaaattctcatcccctctgaagagtggacagattcttaaggattgtccacgtttgtattaacgaccctattgcttatgccgtcacaattacagctaaccagataggtgcagtcaatggattttgtcaatgatttaccttcaaagtaacaatactcacatacaagtagaagttaaaaggatttcaataaatttggtaattgactttttaactatacgtttgtgtcaggcatttatacttagcaaatcttatttatttcaatgtatttgattgttctgaaatcagtgacaggttaataactttgttatcagattactaaattaagcttttatcagatcatgtttacattaaaaaagaaaagcctgaagacattattaacttcatttcaacaagcttctgtaaataaataggctttcattaggaaaccagccctatttatcaaggttattaaaccattttgtaacaaaaagcatgatttacaaaaatgtcccatgattaggcttattttattttgatacgaccaggtttgctacacattttaacataaatcaagataaacagcttgttcagaaaaaataaagcttcagaaaaatgcaccttaatcactgttttgagttactgattaatgtttgtccctgaatctgctccagacagattttatgttttctttgatgactttcactggaatatggttggcttttatgattaaacccatccttatggtataatccttgactaggagttagacattgaaaaacacttaaaactatacatggtcaatttcttataattgatttttttcagtaaactcatggagaataacttttgtggtgattattagaatgttcaaaaacatatttctattgtgaaaacccagtgcttgctttctgagtctgcgggtctatccagcctgcccaagaactcgattcagctaaggttctcccttccattatggagcctggaaggttttatgcaaaaccagtgactgtgctccccgagaaagtccactgagtagcgtgctggacagaacctgaccaggactccatgctttcaagctctggttctaccgtctgttacttaggcaaatgttttcacctgactgtagggttgattaaggcttttggcttgccccaaaaacccctgtatttctggatgggaatcagttggaagtattttgctagggtcctgtctttgccattccatctagctctagtaatcttgatggctcttatctcttatgctctggatgaaaactggtaatacttctttctccatttgttttgtgtaagcatggtggtcggtaagatgatttctggtgaagcagcaaaaccacaggctcttgtttctaaatctggttaactgaatgccttctgtgttcacctgtcatcacaaaaggatgcgcaggagcactcattattttaatcggagtcgttcctaattctaaagttaatcatggcgattctcagatcagggagaaaattaattaagatgcaatgctattttcttctctcccagggtgacatctcccaggtttctcattaaatcgcccatttagtgtttggtttcagtgctttggagccaggcagaccagatgcaaaccccagctgcatgtgccatttgctccctgaggggcagagatgatggccttgctgccagtggcatctccagccctggaactgtgctgggtgcacacgaggagccaaatgcatgttttctgaggggagtaagtggaagaatgaatgaagtcagcccttccatctcttcttccttagctgtcaaataggatgacaaaatacctatttgccagtggttgttgtgaggattaaatcatagatgtaatgcatttagcacagtgaatgggcacatgagaagaattctataaatggcggttgttcatcttcctacaggaagggcagatctctgagtcatagaaattgcttcttatttcccactttcctttatttccttatgtggtgaagtataagttccactggtattcaacaagtaaaactcttgttcagggtaatgtgctactaacttttaagtctgcatattttaaaatgagagaaaatctagttttttcattaactttctactcatctctttctgggcccgctcagcaaatccccggtttcagaggactgccctgtaaggaactatagacagggtttccatccgtatttccattttctgaataagtaacaaggggaactagactctcagggcctcctctgcctgcttcgtccttatggagctgatgtggggagaacactcctcactgtccagtctagtgatgaccacagttctgtagccacgtggatctgtgtactcgaggtcagttagttccagaaaatcatccagtctaacatttgctcagattccctaatttctactctgtgaaagacaaggaatagtacagctcttcagtttcctgggggagtgcttcattacttttcctctttttctttctacttagtctaatgactcagattccagatggttctgcctaagtttagaattatcatgatctactttgtagagagaaaagaaaacatttcttgtacagtacaacttatgtaattttttttcagggaagtgagaaaaatataacacgcagtgtagaagaacttttggctctaacattagatatcaatgtttcgtattctgtcattggggtgtattgtaatttacttatttactgtctaattccttctgtagctagtgaagtttacattttcttttttctttttttttgagatggagtcttgctctatcgcccagactggagtgcagtagagccatctcggctcactgcaagctccgcctcccgggttcacgccattctcctgcctcagcctcccgagtagctgggactacaggtgcctgccacggcacctggctaattttttgtatttttagtagagacggggtttcactgtgttagccaggatggtctcgatctgtgaagtttacattttcaaagaatgttttaatgatatggaaaaatattctccaaacaatgatgtgcaagtacaaggtacaaaccaggaaagtgtaattctaattttttttttttaaaggtcaatatactttcttttttttttttttttttggaaaagaaatattcctaataattcatttaatcatctggagagtgggttgaagttttgtaaaatttaatttcttcattatagactgtattattttaataaaagcttttctttggtgtcacccattgtgtgcagcactgagctggggccctggagctctcactattgtccatctggccgcaccactgtcagcactgctttcaatgaactgtaacagaatactgatgactcagcatttctgctgctgacaggaagtccttgagcgagtctctttgtagttcctccaagaaaggatgctcaggcactccttgggtgaacagctgcaggccatggagaggacaaccgggttgcagtagtaagtttgcactgggctatcccagagctagaacaagggaacaggtcagcccctagagtcccagaggtcacagacttgggcaggtccaggcgttaaatgcagctgtgcctttggagctggacatccaggtacctggctgcctgctgggaacaggtgagtatgtatcagccattgtgaagcctcaaaaggctgcagcctgacgtagctgcagatcaggctgtacccaaattgcattgttactgatgaaataattttttaaaaaaccaatggtatctatttgagcattttcctcatggacaccattcaacagaatgctgttctcggggaacaaatgactcatgcaaatgactattttctaggtttttctcatggtcaagcagccatgatctttttatagctttattttattttaactcagtcccaatggttaatttaaatcctttctttctttcatcaatgatacaaagagctcactttactacagtctcatcttgacagagtcaaatgcagaggctgtaaggctgcccacctgaggaggaggaactggaacttaggaaaacagctcagatgcttcatgcaaatgaggaagctcaattggcttctattgaaaatacctcacgcatcattttctcttgtctctacttgccaaaatatttataaaatatctttgccctgccatacctaactaagcctcttggaatttattttttcagtgagattctctgatgcaataaccaagcactggcttttagaaagtgttctctccccctccctccctccctgcctgtctctctccctccctccctgcctgtctctctccctccctccctgcctatctctctccccctccctctctccctgcctctctccctccctccctgcctatctctctccttccctctctccctccctccctgcctatctctctctctccctccctgcctatctctctccctccctgcctatctctctccctccctatctctctccctccctccctgcctctctccctccctccctgcctgtctctctccctccctccctgcctgtctctctccctccctccctatctctctccctccctccccgcctgtctctctctcttcctccctgcctatctctttccctccctccctgcctgtctctctctttctctctctctctctctctctctctctctctctctatatatatatatatatatatatatatatatatatatatatatgtctgtttctctgtctcactctagatatacaatcaaatcagtgtgcagatggaggacaaagagtatcacaaaattattattgtaacttgtggataataaatttcaaaatctgatgtctgtgctccaatatctgacctccttttttgcaaaatatgcacatgtgaaacctgatttactactgaggaagttaaccctttccttttgaaagtaatgcatcagtagaagatggaaagttcagtggagatgggtgatcttctcaattatgtgcatgagaataagtaaactcccaggcattccgtcactctccaaagtcagaacaatcaagaggacacatcaggctttagaaaaactcattcccttggaagataatctcaatagcatgtgtgaataggaagagcatcaaagtgtgaccgagagagtgtcagagaagagtcacctattacaagcatgatcatagtacttaggaaaaagtaagttccaggcttatgtggatattcatatagatattttccagggttttagaggttcatgatttctcagggagaccaaagtgcctatgtgactgtgaggggttattagtcctctgggttctggctttactcagaaatagcctggaccacatgggtcagtcctgccccacagacattaggccccctcctggggcccctgcagagtgggtcagttctgcagatgtgggaagggatgagtgttgggtttgggaaccaaaggctgtgtgttgagcttacagtagacaatttggagctgcttcttgcttagagatgacccaatatccaaaagtagctattgcgggcaagtggtgttccccaaaaaggtatgttgaagtccttcctcacccccagtacctgtgagagcgatcttatttggaaacaggatctttacagatgtaatccagttaattgaggtcatactggagaaaagtgagccctaaatccaatgactggtattcttacatggagagagagatttggagacagatccatagaaagaacattgcgagacaatgcaggcagagatgggtgatgctgccataagccaaggactgccagcaaccaccagaagtgggaagaagtgaggaaggattcgctgctggagccttcacaggcaacccggccctgctgacaccttgatctcagacttctacacccccacgtagagtgtgagacaatagatttctgttgtttcaagccacccaattggttgcactttgttgcagcgctctagaaactgatacagtggctcaaacagagcctctaggtgtctcttcttttgcaatccaaagactgcaccagtgctacttgaaggggtaagagagctaaataaatttgcttttggggagatagatttgggtaagtttctccatgctgagttagatgagtgatatgtggtggtggtaaaatccagataacccttgagtgtgatgatttcagaaagagagagccaggaggcctgggagccagcaggccagcgggggtccgcccactggccccgaaacagcgaacagtgacattggagcaagggcccatcccgtgcttctctggagccccactgggcagagccaggtggagaagcaggaaactgcacattggtgggctggaggggcttggaggggctgagacaaggtgtgtgcttggggataagggcgttcctggtccccggtgaagcatcagtgaccaagaggcatcctctagaagaggtagacactacatgggaagggagaagcagcatgaaggaaggcgctttaggacaaggggatcagttacagtttcttcgccatgtgccttagacctacagcttgctattccactctgaaataaggcagagtgaagaattcaaaaacaatcactctgggagaaaaaagcgagttctcttgatatccttgctttctcctggcctcatttcctctgatgttcccctgccctcttgcaaatcaatcagcctaaatcaagggtgtctgtgcaggttctcaagacagacatgctgctgggagtggcacgtacgtgaacgtcaaggagatgtcagggcatgcgcatattctttggtgcccaccgtcttattttcttaacttactgggaaatctttttgttagagtgcacgcattaagtttcttcctggcctcatcagccccaaacccaggcagtggcgggcggtttcccgtgaggacagcgtaccttctgaagaaatgcacccagatcagaatggtatacgagtctgtcctattctcgctctagaaaagaaatgtcacaataaataggtgggtggggtctgccccacactccccaaaacaaccaaaacagcggcgagatcaaactgaggacaacgttatcatcatatattcttttctttacacagtttgatacctacctacttctcagaacaaacaccgcggaaaggaaactgggtggatacttactgtttttagtttgttacatactacaattagtcaccattagctaattatatagaaaaggggaaattggggctgttttacccagagttggttttaggtgggggtgaagcaggcagggtgatattggcagcctcatggttggttttgctgattcagttcctctttccttgccccctatttcatacaaaattcctctgacaaagcttcctgtgtggccactggtcagcattttaatagaatggaagggtgcagcacagcaaaggccatagtgttaatatccctcgcatctgccgttcccacctcctccttgcttttccagtcctttccaactctgcataggatgatggggagaggagggagctaggaagggtgagaggcaagcaaagtcatttccagcattttaaagtcagctctcccaaaatgctctctctctccatagccttctccctactggggcttcaaagccttccctctacctgaaaccactcagggtgcaaggaagcctcttcaggtccccctcatccttgatcattacaccagctcttgaggatcctttctttctctaaatttggcaacaatcttctgttgcagactcttttcactattggaattccctttcagggactgctctctacaacttatatggctgcagcagcagcttatctgaccatttaaggctctacactgtgcagacagaaaaggatcacactcctctctcagacacattataagaaattttatacaaggcctgtgcattttcaaaacacaggattgacctaatgagcaggaatttgagaccaggtaggaaaagagggtcatgggatgtggggagctgcctgggggctggtgggaacttgccaggggtcctcatatcccttcatgagacagttgcctaatcagcctatttcaagggatggccctgatttcacggtgaaaagcaaggcatgtttctgcagatacgtcagtgctctaacagcaacatgtcctctgctaggaggacatcctaggagattcgcttccattgaatcagagtaaactatttttttttttttttgcttcttggcagaatattatttgcagatatctgcaaatttggtaggaaagcttttttttctaaatggaactatcctgaaaacaaagggaaaaaagggcaaacacacacacactcacacacacaaacaaacacacacactcacatgcgagccttcccccaaatccttccaagtcttcattctatttaagctgttcataaataatatctgatgataatctcattgaaaatgcatctgtttttatgttaatttttgttaatttgacatccctagacgatatcatgaaaatatttactgtgtgtacgtttgtgtgtgtgtatgtgtgtgtgtgggtgcaattttgtccccttagtccatgatgaattaaaataagtagtttacctatagataactaaaattctatacatgtcttcatgaagtttaccttatttaaccgttgcaattaacacatatcccagaaaaatctttaaattttatttttaatattatcctaatgttgctgagttcccagcaacacaattatttattgcagccaacatctaccatgcttactattacagcaagctcttttccaagttcttatatcaataacacacaaggcagggcctgtgatatttcccatttgtggatggagaagcagagccgtggacaggtgccaagtcacccaggtctcaggggtggggtggggtctccccacagacagcctggctcagacacactctccactgccgcagcgcgagggacccttgtcatcatcccacagagtttgccttgtcattgcttctgaagtgcttagagactgtcaatgaaggagcaatctcaataaactttgtggttttgtcatcctcagaaatgaccaatcttcatgaaggtggtgttgtgcaagcctgggcttctattaaaataaaaaagtgtgctttgcacctaaggcaatggtgggattaaagcaagtagcaaattgatgttctcatttaaaagtcttgcctggtctgtgagtgccctgggcctgcaaaggtaaaagaagcctgaccacaaagcaactgggcattctggaggttactgggcagacctgagactccagagaaagtaggaagagaaggcagattgtcagttaatgatggcggtgttcgtttctgtttgtatacttttaacagtctaaaaatggggcttcggacacaatacctttcctaaatgaaaccagtgcctgcttcgttacaggcacaaggtatgtactgtgggtgacatccagcccccttcagttttccagagtctttcctggggtcttgcttggctcagggccactggaacacaacccacccgatgacaccagggtgtgtcgagcctgtggtcaaggttcacacgtctgtgtgtgccacaaccactgcagaggggaaagacatcatccacacaacatcccaccctcagcagggacttggaaaatcaggaacccgatagtccatagttggggagactgaaaggttccccaaacaagcaaggctgctccattttacctaacaataccatacctactggcacggtttctccctgtgccccattgctaacatttctccttcgagttggcatgccaaggaaagcacagtgaaaaatgtctgagttccgggttgctcttagcaacatccatgaatctgagtttctaacctccttccctatagaacagtgcctgaaggaagaactggcaatgctcactggtgtcagaattgcccacgatttttcccttttcagcaattatttaagtgctccaaaagcattgcttccttactgttttcaaggcaagatagaaggagaggttaatcttgcttagaatttcctctgctttcaagttccaggttgggggtataaagaggtttgatagaaaagaaccgcagcagcccaggcctggctgcaggagaaagcaaagtggctggggacagggggtgtggagagcaggtggtctcccgtctcctccatcagggtcaggaatgtgtctgctcctttactggaaccatcgccctccctggatggctgtaccgtttagggaggcctgtgctgacaatacaggtgcaattcaaaagaaattccattaaaataaagtgggcagtggggagaaacggggaattctgtcatgaaacataaaacctaaaatactgtctggtcaaaacctagacagcctgtgagacccatgagagctcggagaccctgctttcggagcataggtggggacccgaggggtggggccgtgagcagggtctcaggccagccgtggagaaggcggctgcctctgcggggatgggcaccgcagcgtggtgggcagatatgaggaaggcaaggactttcccattgaccatgcaaaaccttcacgaagtcagggtctgtccaccgtctaaagatcgagacctcatgttgagttctgaggtaaaatgggaaaacagttttaacagtgcagtgaagcttcctgccaataagcaaacctttccaccctccgctcagctacagaaacacatttgggagctccagggaggaggcggaggggcacaggcgctccccagtgtgggccacgctcaggtgtcccttcacaatggcagccacactgcttcgtgaaacggacacactacgggatggaaaacagtgagagggaagccacggcatcaagaagcaataatcacagaatgtttttgtgctgtccacgccttcctcaacatctgcctccacttccaagtcaatcgagacagcctgtttatgtggagctttgagatgacacatacactttactgaccctagaacaataccctttccacatctaaagcaattttcgtgtaaatgactgtgccattaaccttccagggtcattcaaatattttctgagaaattggctgctttcgggattttcttagaatgccatgtgtttcatttttgtgcagaacagatgacaggcgaggcattccaacaggacttcagttgatttaactaattcctgtcaggggaagtgaagtgttgggattcataaagccgatcccagcccggagattttccttttcccaaaacagaaaaaacaagacatgctgtgtggttttgcaaccgggcaagtttcgaaatatttttaagctttctactttgccaagtatttcataaaaaaactattttctttttgtttcgtgccaaaaaatgtcacccctaaatattttttcccatatctggtcacatgtccaggattttttcttttctaagaataaataatttttctgggttataaaaattccacttgctctatcagattaaacatatctttatatagaaaaagcatccgaaacattccccaagtgggtctaagggaggagtcttaatacaattttgttaaattaattttgattaaatattaggccttgaattctttttgtgactctcacaaagttcaggcttattttgttacactttcaagtctccctttttttcactctccacatactgtttccttttattagaaagcattcaagaagaattgattggtgtgtttgaccaaaataatatgttggaagtgataccagtgcaaggggaccctctgggttccattctctatttgcatagttagctggagttagaaggttcagctgtcagggattcaagaactctagcatcaaaaaagtgtgaacttgcaaatgagctgtcaaggttcatagcaagtgaataatgcagctgagagctgacttgtctccaccctggtgttctattgatcttgctgctggataaagcataggcacataggaacactgaaaaatagcaatttgtatgggttggactggtattttcttttttaccagttaaaatgttaattacattcacaaagtcaaaaagctgaataaatagtcttacagttggaaatatagggcaaaacaaaacacaggcttgaaaaagcaataatagctatacacctaaaatgtgaaaaatattcatagagaaatgaattgtagggcattaactcttgcaaaaccaccaaaggcctggtggaattaatatgctacagatttgaaacttaacattgggcaacttaaaatgcatgtatttgttattgatatttaactaatccttgtaagtaaatctactataagcgaaaagcattctaaattgatgttattgctagtttgcagggaaattctgaaagtctatgtgtttgttggtgcatgaggggatgtgcgtattgaggtgtgtgttcaggatgagggcttctggtcctttagaaatggttccctctaagcttcttggtttccaaatcttcatcactctttttaaaatctaaaaatgcaggtttactttatatggagagcacattgctatgaggagatgtgacatttcagaaagagcacatggcactgattctgaaatgctaccaagttgcttcagaatatacccaaattctctcaaagattaatgatacactaagaaactgaaggacacagcaaattattttgcttgtcttcaacccactgtcaccctgccacaaattgaacctaataaaatttccatccctctcccatcttatgatatgacccttccccctcatgcatggggaaattgttatttacattgtgaaaatatcaagcatctccaaacacttacgttttgtggagccgggtctcccatggtaaaatgagagcccaacacggtgagtttgcttcctaggaatggcaaatcagcatcgcgatgccctcaaaccagaaataatacccttcatttgctgcaactggttgagtatcagtgctataaaaaatagatgatggaaaaccggagcccttgacagaaatacaagtctgctgtgtgtggcttgtgcaggaatggagcagagagaagcggtggtcttgtctacacatcatacttgggcttcgcccatgctgacaagtggaagcacatgcacagtggacacacgctgtcaggacattcatccctgctggcacgtaaacggcagggagctaaactgctagaattcaagtggcacagaaacttgagcctatggaatatcactgtggagtgggcaggccaagttctttacagtgctctttgcttttgcaaagaggtaatttccaactcaagaatgctctgtggctttggcgtcaagaaagctgaaagtcagtgaaatagagccttgaaggtcatccaatctgcgctgcagcaggaagtgaattttgggagccccaaatgcaaaataggcagctcagcccaacattaactcagcccaacactaactcagcccaacattaactcagcccaatattaactcagcccaacactaactcagcccaacactaactcagcccaacattaactcagcccaacattaactcagcccaacactaactcagcccagcaccagctcagcccaacgctaactcagcccagcaccaactcagcccagcaccaactcagcccagcactaactcaacccagcactaactcagcccagcaccaactcagatcagcaccaactcgaaccagcactaactcggaccagcactaactcggaccagcactaactcaaaccagcaccaactcaaaccagcacaaactcagcccagcaccaactcagatcagcacgaactcaaaccagcactaactcggaccagcaccaactcaaaccagcaccaactcaaaccagcaccaactcagcctagcatgcactgattctctggcatagactcagactccaaaaatatgtcgagaaagtctaaccaaaatttgcaaaattaggacctgtggtcagtaccttgactaaatatgactctgtctatgaacacaagtaggcataatgtaacataagacagtaaagaggggcatcgttagaaacctttagcattatgtcagaaagggcaagaggactcaagtagaagaaaggcagagagaataacagagggacatgcatgaaaagtacttttttcttcttcagtcctgcaattgcattaggaacagaggtcaggcccaagagctgccctctcctcacttttctttctttcttttcttttttttttgtttttttttttttttttgagggggagtctcgctctgtcgcccaggctgaagtgcagtggcatgatctcggctcactgcaacctccacctcccaggttcaagagattctcctgcctcagtcaccggagctaatttttgtatttttagtacagatggagtttcaccatgttgaccaggctggtctcaaactcttgacctcaaatgcccgccttggcctcccaaagtgctgggattacaggcgtgagccaccgcacccggcctgtcctcactttttatcacatactcctgctcttgtggccctgcttgaacacagcaacagggtctacataaaataaattaaaatacatttaaaaaaaaattacctgctttacttctggtccatagcattggacatacccagccagaaatcatacactgggctggtttttgggagccaactcaaatgcttgtcctttgaggtaagtattagggtgctcgtggcctcccgccccacgggtccttcactcactgaccctgacctgtgctcactttgtctcaccacctacatttcccaacagttcatgtttgatacagctgctggtcctgccaaggctggaggccctccccatccgctgatttgcctttctctgaaatcggcatcttggctcctctgcattatttctgattggacttgtctctctggcttgttttctctgctaattctgatgaagacgataatctctagctctcaggggccagccctggctacacagtttgggggtagtgttcaaacaacccttgagaatcttatttttcaaggctgttggctggcactttagggctaaagcaagtggtgaattaaaacacaaaacaaaacaaagcaaaaaccacaggcctaaataaacatatgcacccaggagcatgactgtgcagacagactgcctggctttgaatctcattgccaccattgattggccacttaaccttgcatatcacaagatgggaataataaggcacctgcttcatagattgttcttttagtcttctatccgtttgttcattccttcagtaaatatccatcgagcacctactactgcccagacatacggatccagaaatgtccagcacagattaagaggccacagcctcgtggattttccattccagggcatttttcttcaaggatccaataagatatccccctaaactatacatcatagagcctttgacacagtaaacactcacatgccattagctgttatcacggtaacaataaaaataaacttttagcaaaggttttaactaaatgaggtgagaatcataaataaagatatatttgctatagtgaaaaggagagaaaatgtaggaaagtcaggcaagaggaatatttgccaaaatcattcatgaatctgacacattagattctgggcgtgtcctaagccttgacctgtgctacttgatgtgggatttgcacacctgggacacacgagcttctgaagttcagactgtctgcactctatctgacacactccacagctgcacaacttgcagcatgagtcagcaccatcctaacctctaaagagccccgcgggcacagcgaatgcacctcccagccctttggacgtggtggcgaccagctggtttcctggagaggcatctcctttacacccatctgtgaaagaaatctagatctaagccttagatctcaaggttagaaagggggtaaggttgaggttccggagtgctactctattagacacattgtcctttttaaattatatttttacaataatttccatttattattttttcgtggcatcctagtgaggcaggctagtttgacaacatgctgcttaggggaaatttgctgttaataagtcttttgagctcactaaattttggtgcagcatgaaaacccagactgttttcaactctctctctggcatacccgcttgattcctgatagggctattaattttgcgcagatttcccaatttgctccccatttgctacctgggatggtgaagaacagacaaatagcccttcggaagcaaaagcagtcccaaaccaggctgagtttcgtgatggcttcttccacattgtccttcattgctgaggatgaaaacatagagctaaaaactgtgatacacaatgatttatcacctcctttccatgtacacacctagtagtttagaactctgttagcttcaaaatctattcagtcacattgcattcccctccccaactcccacaaattctacatgaaagagggttcaggtagcaaatgagtggaaggacagggcaaactaagactctgatggtgagcccctcctcctcctgattcagatgatttcttcctcctcttcctcctcctcctcctcttctggttctttcttctccttcttcttcttattcctcttcctcctccttcttcctcttcttctatcttctttcctcctcctcctccttctattttctttcctcctcctcctcctctttctcctcctccttcttcttctccttctccttcttctattttctttcctcctcctcctctttctcctcctccttcttctccttctccttcttcttcctcccctcctcctcctcctgtccccctcacctttcccctttccctcctctcccatttccactttcttccccttcttcctccttctcccccttcctttcctcctcctcttccacttccccctttctcttctccccctcctcctccttttcctcttcttcctcctccttcccttctctctttttttgttatttgatctccaattttcacttcctaaaatttcatatggttggatgctattataattattcaattacacaatgattacatgtgggctggtggttttgaaacaatgtaccccattgtatgcattattgcattcatgtggaacttgaactgtaggaggtccatgcaggcttttccagggtccccaagagtactttgtgggttttggatccaggtttctgtttcactaaatcagcatattactctagtctacagtgtactgttgggctagaaatagtccattgactattttagactctgcatcacgaaacgagatctatggttttggttgaatttcatagaagaatattgataaattatcattgttcagatcattaatcttctttagctcaaatcaaacaatgaagtgatgttatcttgcaaaccatgcaggcaggtggtggcactaatgagcctgccacatcggattaatctttgaatgttcagaatctcagaatgagaactttccacaaattcaaaactgtttgatgaactgacaatgtccaagtccaccaaatggtccaacattcagagatgaaattatgtcatgacataagaagcctaatggaatgaatggccactatgcattaaagaccagaatgtgaaaacctggctcctaccattcagacttccctgaaattgtgaaacatgattttccccttcaccctagggaagaccctctggcaaaggcacattcactaagggtgagccttcttttggattgggggctcagaagagagagtcatattgaagtcgcccaaactgttctttgccctggctgcccgctgactttgttaggcagctggtgctaaggagagggtaaagaaaacagaagacacttgtgggccggctcagggatggacagtacctggccgctctccctgtgtgatgcaggtggcttgttctgaggtaggtgggcatacaggcagtgagtacatctccattgcagcgggggaaggtggatgtgggactaatcagggatggagagggagggatgctgcaaagatgcccgagcaggtgctgtcagtggggactagggaagcagtgtctctatccgagagtgcatgccggtggtaggggagcaccaacctgaacatggccagtaagaacacaaactagacctcccagattctcccgcaagtaaggagagatcagggactgttccaatttttggcgttcatattttttagacagttgtcttaaaaaaaatgcctgcttcacttgcgttaagaattaactaatcatggtccagacttatgctcaggtagacaaggaggactgaagccacagtgggctccttccaacctcacatcacatcttcctcatagcacctgtgcacccgaggtgcagatcctgatttgatggcgacctattacaaatttccttagactgcaagcaatcacactatacttaatagctatatttagtagaatacttagattaatacttggagagaatttaaatttaaatattatttccacagccaaaagacaaaacagcaatagacaaatgcattctctttttagttttcttcaacggatatatttcatttttaagcctatctaccccctcccccgatttgaagacatccctcgggctacgtggggaggaaagcctgtgtgactgatcgctgcagtgactgctcttggccatgactgttactgccattttggcctctctgaaaagtgaggcagcctaagcctcacagatatgtttcctggtcacatttttgttgtctctacagaaagagaagcaaacgatatcaccaaagtcctaactctatcctcccactctgtgaactacagaaaaggaagcagcagaagaaataatagagggaataacaaagtgacagaagcatagagggaaaagcagcaggtggcttttcatcaaggggcctttgggtaagatttacaggagacaatgttttctctgcgcctctgggacttgaaaggtcatggaaagaggactcactcgcgacagaattcaaacactcgtagttgtgtctcaaagtcctccgcggacatcaccagaaggcatggtttcaggggtgtttttcagaagggcgatggatttctttggatccacgtagtctctcttatctggttagagtttcttctttttctttttgttcttttttgacacagagtctcactctgtcgcccaggctgcagggcagtggcaccatcttggctcgctgcaacctccgcgtcctgggttcaagcaattctcctgcctcagcctcccgagtagctgggactagaggtgtgcaccaccatgcctggctaatttttgtatttttagtagagacagagtttcaccatgttggccaggctggttctcgaacttctgacctcaagtggtcctcctgcctcggcttcccagagtgctgggattacaggtgtgggccaccgcgcccggccttatctggttagagtttcttaggtgggaatggagttagcagtcccagaccaggccaagttaggacaagctgagaaatgcatcctgtggttgacacatggtgaggaatacccaagcaaaatactcttgtgtgaggcttagactctgtaagaatctaccactttatgaagagactttcttctcccatctaccagattttccaccaaatttgttgcagccttgttatgggctgaattgtgccctcttaaattcatgtatcgaaggactggccccctaggacctcagaatgtgcctgtgccctgtatttgaagacagggactttaaagaggggaaaagttaaactgaagtcattagggtgggccttaatccaatctagctggtgtccttaagaagagtgccgggcgcagtggctcacgcctatgatgccactgcactccagcctgggcaacagtgtgagacttgtctcgaaacaaaaaaggaggaaatttggacacacaaaaaagacaccagacaccagggatgcattcatagaggaaaggccatatgagatcacagcaagaaggtggccgtcggcaagacaaggaggaaggcttcagaagaaaccagacctgctctcaccttgatcttggacctcgagcctggagaactttgagaaataaatttctgccatcaaagccaccagtctgtggtactttgttatggaagcccaagcagactaatacaacctgcaggctttaaacgatgaacaagggatgtgactttattgtaggaccagtaatttgaatttcttgcaaacgcttgagtgtaagcattagtcaatagtcagtgatctgactggaaagaagcagagggcacaagttcatggcagtgtgctcaggggtacctggcccctctgtgaagagccccatagaagacaaggcacttgggccctgtctcaggggcagcacaagcttccaggacaccaccgtcactggtcacttgctgctccccactgtggccctggacagatgagtcaggcccatggtggtcagggcagtggtttctcctcgtcctcccccagcctgcactactccgtgcctggagctgtgaaaaattggcctttgctcgggcgcggtggctcacacctgtaatcccagcactttgggaggtcgaagtgggcacatcaggagctcgagaccagcctggccaacatggtgaaaccccgtctctaccgaaaatacaaaaaattagccgggcacggtggagggcgccggtaatcccagctacttgggaggctgaggcaggagaatcacttgaacccaggaggcggaggttgcagtgagctgagaccgtaacactgcactctagcctgggtaacagagtgagactcagtttcaaaaaaaaaacaaggtctttgctgcttccacagatgctcacatttctccctggctcattttaagctgtgctaaaatctggtaacaaagcttgcttttatttaaggtacattttgtaagttttcgggtggcccactgtaaggtagagagccctgctcttggtgacttgctttggaactagaaaattagcatctagctgtaccatatctgggcacatgactggggcttcatcaggtagggctgggctttcatgaagtaagttgcagctcagggcctcggcgtgcgaggagtgcagttgctgtgtgtgactggctctgtcaccaggagccccgcgtattcttcagggagaattttcaatcatgctggttttgatttaggcaatatggtcttgaaaatattttcatagtctagtctccatcaatcttattcttccacactgacatctgcttccagaatttggagtaaggcgagctgggaagtagggctctgaaatcttgaaggactgcctaagcccccccaccacacagaagcaaaagcagcctccacaggatgccagcttagcaagggaggcctcacgagcaattttaaggacctcagcactgatgacgagagatggtgtgttacggattttgcatctgcagttttgccattagtggcattttaggaataaataaggttgatatgttaactacctcaaaataattttcccattcaattagattttgttagtgaactcactcatcagtttggatagttcaagtagtatactgaaaaatgatagctaaacctggcttatgattagagctggtttacattttgccttcggcaagtggaggatttccctaggctgtttctggagcctcatttattgatgagcttctgtgccctactccaagaagcacctttccacctgagaatgaggggccccatttacaatattcttggatgaggacctggggaagaatgcaggagagccccaagctaagatggtattcaaactcagagcacggcagaaagttcccaaaaagatgttagaagtatggctcggcttgctgctgttttggcttttaaaaaaagattatagcaagaaccttttagggaactccacagccaccagtagggatcggcaggcacattgccccagctaaccactggagtggtgttcagggagggtttgggatgtggatgctgctccaagccatctgggagggagacaggtgcagggacagtcagcatgaaagcaactggggactgggattgccatagctcaacagcctgatgatggcctgaggttgttgccaagagcagctcctaggaactgctccttctctgagccaccctctgggaacagcagagctgtcagagaagatttaattgttttgatcttcctgccttcttgatatcccattgagagtcacccttcagggagaaggagatagagtcgtcattttgtattaagcaatgacaagaaagaaaaaaaacttttaagatgaaatcctgatgggattgaaaatcaattaatcaatcacacagacctctgattcctggtcattctggctcagaattacagacataagtgtgtgacactgtgttaccttagggtatatggacttttagaccagtagaattttatggagagaagaaacagtaaagatacattagttcaatgtatgcattagtgtttaaggtaataattttggtgcaaaagcagaatgggccagatagactagtttgccaggagtttatggatctaatgaaatagtttcagttgctcatttagagaaaacaaatgcagaaatagagaccacagctcttaatgcaaccaaagagagaaaatgcatgctgactaaacgtccacccattaggctccttattaacagaaatgagaagttattctttggggactgttgctctcctgctgctctgtcatggggctatggcttcattttccatctataaacaccaaacactggaaggttggttgctaagagaactcactggggaaacagttaactgttcaaatgtccccacttacgtggatatgtgcaaataccaccctctgttcagatctgcatgttgcagaaagacactacgtgcagtggactaaagctggacgccggagtgtcccacagacccaggttagcacccctgccctgccactcactagacatgtaactcacagcaagttcttaagaactctttcgaaactattcctcatgggcaaaaagaaaaggatggcaaagcatgattttttaagtgttcactgtgtataccaattatgaacaaattgtaaaatcctgcttcatttcatcaccatcaaaccataggcttaaatttgctcataatcccgacaacactgtgtgtttggaaacagtggaaacaggaagaactgagagcgggtctgcattcaggatccacgtggctccaatcataggtgtgaaaagactcacatattccgtagcatcataggacccatcagagtataacagctaagattattacacatgctgttccagtgtcccactcacactgcaccacagaaagctctgcagtggatcaattgctgctgtgcagtccccaacatccgatccttgctgaagtttattgattaagctggctaatacactccttacacagttatttggtaccatattgaaaatacattaattctaaaataacaaacaaacaataactttcaacctctattgctagtttgagaataaaatgctccctttggtgcagtgagtagtgctcatgagtgacagacaatttgaataagaaaactgggctcttgatttagatttttggctgtcaattacatttggaaagttgggggtaaggtacaagctgcttaggaacccttatttcttccccctgcccttttgatatcatttctctctcttctccttgaccttaggtgggtcaaggagttggaattcaaatcacatgagcaaatagcattcaaatgtacatgatatataaggcactttagcgatccaaaaaaaatttacaatatagtttctgtctcaaaaagtttattgccttgtttggggagacaaaacataccacacgaaaagttcatgatacaggatttaaacaagggctcaacaaatcatagaggaattgttatataacatgggttcttccattaaatggtaaaggaatgctcttagctctaaatactaaaaaaaaaaaaaaaaaaagagaaagagagagaaattcaggaactgtccaggtaggattgaggtaaaggacagggacgaaatgaactttttgagaagcatgtaggtggctaagtcagtttggatgttaggaactacactgagaatcaagagatgaggaagaccaagggcaaaccgaaacgagacaggctgagacaaagcgagatgagacaaagtgagaagagatgagacaaagcaagatgacagaagtttggtgatcatcttggacattttgctaaattaggtgaaaaaggagcaagaaacaggtatccttaggcaaaggcaacctctgaccaagcttgatgagggcagatgaggactgattctagcatgagagggaggtgcaggagaggcagctgcccagtaggtcctcagaagatggtgaaggcaccactccaaagagtgtagatacatactgaccacaacagagacagaatgtgtgtgtgtgcacacgtacacatgaacgaaagaggctagggcatcagaggggagaggaaatacagggagaagggaagtcaaggaaagatgcctgacattccacaggagaagcttctgcacaggagcagtggggataacaactccaagatgcactggagaggggtttttgctagagagtcagcatcgcaaacaagcagagtacctttgcattaaggtgcgatttaaaaatatgttattatctaggatagtggtgctcaaccatggcgattttgctccccagggaacatttgacaactgggagacagttttggttgccacagctggcagtggggatgggggtgctaactgccatcgtgtgggtagaggacagagacgctgctgaacacccagcagcacgcaagaagatcccacaacctggctccagatgtcaatggcaccaaggctgagaaaccaaatttagaggatcccagggaaaacagaaaagtatcttaaaaataaacattacccagtattgtacagttgacaaatgttaacattatgcatttattaaaaacaaatgtaagcaacatttattactgtagttagaattttaaaatatgtacatatactgcagcagacttttatttatttatttatttacttatatgagacagagtctcgctctgtcgcccaggctggagtgcagtggcacgatcttggctcactgcaagctccgcctcccgggttcgcgccattctcctgcctcagcctcccgagtagcttggactacaggcgcccgccaccacacccagctaattttttgtattttttagtagatatggggtttcaccgtgttggccaggatggtctcgatctcctgaccttgtgatctgcccgcctcggcctcccaaagtgctgggattacaggcgtgagccaccgtgcccagccctgcagcagacttttaaaaagatatattcagcttcatcacccttttcttaaaaaactgaaattacttctgtcaaaatcatgccgatggaaagcaatgacatgctaagcacagtcctttacagaaataattcagatagaataagtggaaaataaccttaaagaagattgaaagaagcgacaacttaatgaaacccagctactggttccattttctatttatccttccaaattgctaatgaattctgacccatttagtcatgcaaaatatatatcctgaagaatctgtatcccttttgaggtacttaatggatgtttagccggcaaggaaatatggcatgcctattattcacaatagttgatctttaaattgacattaatatgccacacttagagtactggggaaattctagccaaatatacaaagccgctgctactaagatgaaagacattccacaaggaggaaactgatctcagaaccagtgaccacggccatgagggcttcgtggctgctacagcacgttagccataaacaatttccatctgaggaagtgcattcagtgcagctgctgatgcatagtaaatatttgatcctaattggacctaatgatgaatttcaattctgtattcaccattcttttataggacaccaacccataaacacaaaaaataaaaaaggttttggggaacatttttcatttccttaagtcatttaataatgatgaattgcctgggaggctctttgaaaagatagatgcggctagaaagttactgggagaattagaaattgcataaggattcaatgcaaaatactttgtaaaaagaaattttaacttccttgtttaacttattttaattcattgagaaattaaaggtaaaatatactttataaaaatataatctggcaaactttaatttgggtaccaatttggaattcgattaaacaggttcaagtctatttttatagattataaaaatgctcctttcagataaagtaaaaaagataattttgttttgggagttaaaagaatcaatgtctgtgcatcctttagtctcaatagaataactcttattctatcagtaggcagaaatgtttaagcagcactgtccaaaagacatacatgtaatttaaatgcttttaaatggaatagaaaagtgaaattctctggtgttttttcttgtattctttcaaaatcatagcaccaatggatgtgagtttctaacattattcacctatctttttaaaaatttacccctgaatgcttatacactgctggtggagatgtaaattaggtcaaccattgtggaaagcatttggtgatttctgatagaacttaaaacagaactatcattgacccagtaatcccattattgggtctatacctaaaggaatataaatcattttatcataaagacacatgcacgcatatattcattgcagcatcattcacaatagcaaagacatggaatcaacataaatgctcatcaatggtagacttgataaagaagatatggtatatacacaccatggaataccatgcagccataaaaaaggacaagatgatgtcctttgcagcaacatggatggagctagaggtcattttctaagcaaactaacacaggagaagaaaaccaaattctacatgttctcaagtataagtgggagctaaacattgagtacatatggacacaaagaagggaataacaaacaccacagcctacttgagggtggaaggtgggaggaggtgagggttgaaaaactacctatcaagtactatgcttattacctgggtcatgaaataatctgcacacaaaccccccataacacacagtaacccccgtaacatgctatcaatctatctatataacaaacctgcacatgtacccctgaacttaaaataaaagttaaaagaataataaaaacagaaagtttacccttgataacacgttttatgtataatcactaaatctactaaggcacatttgcatattatattatagagtctgctagctctacagtttttccaactgtgtacagtcggccaactaccataacccacatcttccaaatcctagtggcttaacaatggaaaatggaatatccagtgcagctcagtggagtgtggggtggggggctgtgttccaaacagccatttagaaatgatgctccttgcagctattactccaccataccatggggtctcacagtccttcacatcccctgagtccagctgttagctgagaggagcgagaatgtacaggatcaggtatgggtttcatgaggcagacctggaagggcaatacatcacttctacgagccagaaattgtcacacgattccttccaactgcagaggaggctggggaatgtaatctacctgtgtgcccaggaggaagggaaatgggctttgtgaaaatgtgcagcattatctctgacaaactggcaggaaaaaacccactaatgtcatatctttatatacctgagagatgtatcatcaatgaccaattctctgcccttggcagaatgccgattggaaatatagctttggacagggccaatattaggctacgtcaagatgaccagcatgtgtcctggcaagctgacaacagactctgtcaaacagtcagcatggccagattaccctcctggtcttccaggcaatcatgctcctcttcccactttgggactgacacctttgcttcccatcgcaagcacagccaattcactgaaaagagttgactagtgtcacttgcattttcatctgaataagggaagagtcactgtcacttggaatgtgaccatagactccactatccttagactacatcaaaattatgctcctttaaactatttggaggtaaaagacacaagaaaataataggcaccagaagcatacacaaatgtgagatgtttggcatggaagacagttttctactcataaaatacacaacttgaaagttggtataaatatcagatcctgaatcctgccagccacatttttactggcaggcatagcaggagacagcacaatgaaaattctcatagaggttggaagtagcaacaagtcttgaaaactcatttgactatcaaggagggctagaccacacattaactcagaccacaaaggctaaaggtctcacttagactctcttatcactcagcatttagaaccagaagaataatcacattcattctttcaagactttccctttaactatacataagaaaggaaatgtctttacattcctcatatctcacttggcataaaatctaatgtttgttcatctcacttatcttaatcccatacctcctcatgtttattagaagaaaaaaatgtaactctgcatgtcagaaaacagatctgaagtaaatatcagttaaaatgcaaaacaaaaagcaaaagaggtctcagatttttacaaatgttgttttatagaaaccataaaattgaggtaacttgatttaaaacaagtgaagacatccaagaattttcatagtatgcaagtgatctggactggtggttggcagcattgacattaaatcagctgaattttcattgacagctcattagaaagatgttccaagaaaatcgaatacaagatgctcaacagaagctcttctctatgcagttcataactgttattttatgtccttacaagtcatgactcatattagaacacgtaactctgtaaaatttaaagatttttataaatcgcatgaaaaatttccccttagtatagctataattttgctgtttatgtcacatggatttttaattacattttccaaacacgaaggcagtcaatttgataaggagaatatttcacaaaattcactcttctgttctaggatcttggttctaggtaactcattctccagaaagaaatcatatcagtcagttcacaaaagaaaaaaatatttaagccacctaaaaactcaagtactattcattgttaattttgtctggatctttacattaccttaactatatggtcagtctataaaaatgtatctgtacatatgcttacaggtaatatgtaatataagtaacatccagggatggatcctgaagcgggcttccatttttttttggcatttgtattttaatgaaggttaataaaagccaaattacagccaactgttaaagctttttttttttttttttttaattctatggtataacaaaatcagttccaggtttttttctgaacaaatgatcctttggtctttcccgtggcatgctcctaaaacaactaaaacaaccctctacgtctaatcagtcacctaagatatcgagtggcaagtctttcacatttgctgcttataattcctgaatggtccatattgagtattttcatttctgggtaagggaaaaagcattttggtccattaattcacccgctcgctcctggaggacgttaaccaattctgctatcacaaagacgtgagtggcatcaatgtcttgcatgatgaacttcgcaggcttccatttttgttcactttgggatggttttcctgtcgaactgcgtggaaaagcaggaagcacactgtccactgtaggggttcctggtccagcagaagactttcagatattgtcaagtttagtccacttctttggatctcagtggcttttattctgacataagatatttagatgttgcaagcccctccaaggaacactattttataaacagaaacatccagttgtgtggccatttcataattagcttctgaaatggacaggaaatgcacctatgtgaaggaggcagagcagggcaaatgcctttactgcttttcaaattttgatttccgggtaggaaacacaactaaacctcctatcaatttttagtctttacctgtacatttctaacttttagagatttctgttaatgttcctttttcttgttaactttgtatttgatattcaagaaacgttagaaatgaatgcctgtataacataatttcaagatattaaaatagcatttatcattaaggccacttgctttataccaacatcacaattccattttaagagttattccatgtcctgggaaattaaatcactgtctcaactccttccaggtgacataagaagacatggaggcatgatggtctagcagagagaagcctaggtggtatggattgttccatgttgtggaacatattacagagacaagggtatacattagttcagcaatttcgagttcttaaaacatctgctttctctccagctagatctatacaactggatggagaagatcaggcttaggtgttctgtaaaatttaaaaatgagacccctaatggcagctttcctattttactcatatttttggaatattttcaagcaattgctgatacaatctggtgagccactgatggaattgagtgtaagaaatggaaactgctatggattgttaacatagagactgatgaccagattacaggtgcatatattttgtttatctagagttgtgtggaggctgctgttcagagcattgctgacaccagggcatgaaactagtgacacagttaatgaggctggtgatgaagaaactctcgggtcctaaccgataatttcacatacctagtaaatcagcattatttcatttgagttacacttgactttttaaaattaaatatcatgcgaaagactttccagaattacagcattccaccaaattgctctagccaggaccccattgaggtccatattgtaaaattatcaggttatatctaagccatcatctttcttgattgcacctccccctctgacatagtttcttctcttggctgtcagcacactgtgcccgcttgccttcctcctatctccctgggcatgccttctcagtttcattgatagggttctcctcctcctcctggcctctcaatcttggaggtttttagccttgaagtttcttagcctttttgtcctctttctgcactcactgcctcattcagtctcaaggctttaaacaccatggagacccagccatctcttgccgtctcctccatttccacccattccaggcaccttccttcctcacctggccgttgcaatagcttcctaattagtctccagcttccaccttccccttcttaccacctactcccttcagtgcaaaagcctcaacctctggcactcaccctttctttctcttggttgcagctatcctggcctccttgctgtgcctcatactggaaggccactcacactttagggcatttgcagaggcagtgccttctgcccccagatgggtaaccctatgggcaacccccttcaacttccttgctcaacatttgaaactccaagctgcactgtcctcaacacattctccagatcctctttaccctgctatgttttgagccccttttactctcttacctactgtataatctcctaacatgtttaccttttactgtgtgttctgcccatgggaatttaagctctgtgggggcagggatttttaccaaggttgttcactgatgtgtctcaagcgctcagaacagtcctttgcctttggacagtgctcggatttgcatgagtgaatgactgtgctctctccagagtgatgaggatgtcaggattgctaggtttagaaatgaagcacatcctatagtatgacagagcctgcagaggagataacagcttctcgcttaaagatatggagtaggcgttaaaaatgatttctgcccaatgtaagaggaggattttccaattaccaaccagaaggagttgcttgctcttgcctcagtgattctcacaataccatatgctatcaagttccattgccctctttgtacatgtgagggtaaggtgctccattggatgtatcttgaaacagaacagagtttgtgtatgtgaggggggtgtgtacctttttctaaggattgagctggatgacaaaggatattgcatatttaacgggtagggagaacgcaggtgcaacaattcacaaaaatctcataatagtgaatgatggtgaatgaatagagaagacctaagaaatctctcaaacgggtgagttctctaggaattgaaagggttttttttttttctgttacagttttaaaagaatgtggaaatggaataatttgatgatattaagctgtggttttgatgaatgctctaagaatcatccccagtgataaatattcaaagataaatggtgatgttttagatagaagtcaatcgttattctattgcctgtaacagggttccttagttataattctgttagttgctctcatggtcttatgttactaatatagtcattatttcaaagcttatcacattctgtaaaatcctgtagtcattagcaataatctaagccaacgttagcaatccattaaggttagacatttaacttctataaaatactctatgccacagcactttcatattcctatggggcaaatttccatcgtagactccacgttggctccttgaaatggtgtgtactcaaggatagcccagcttaggggactccaaatgccatttcaattttaactttatacaacagattctcgttctccatccatgcttagacttcccagctctcaggttcaactctcagatcaggaacaaccatatgtactatgttttgtttccatcgaattggcagtgactcattatttaattactctccatgtgttggccaaatatgaggaaagaatactctgaaaaattaacaaaatgtggctggcattacagccatgcagtgcctcatgcctgtaatccctgcactttgggaggctgaggcaggtggatcacctgaggtcagaagttcaagaccagcctggtcaacatggtgaaaccccatctctactaaatatacaaaaaattagctgagtgtggtggtgggcacctgtaataccagcttctcaggagactgaggcaggagaaccacttgaacctgggaggcggagattgcagtgagctgagatcgcgccattgcgctccagcctgggcaacaagagtgaaactttgtctcaaaaaaaaaaattaacaaaatgcatctgtataggcatcctatgtctgcataatgcgtctacacaggctttgggatgcagcagcattggatagaacaatactgatccctggcaaagatacaccacaaaaaagctcggctgcctttcacaaatacgagttcatgaacacgtccaggaagataaaagtgtgcagtgcattaaaaacacatttccttctcattagttgcatgaggatataaaaattaaatcaaatctgctttgttgccaatttcaagaatgtgactgaggacaaggagcagaagaaagcagtgtcaccaatcctactcggaataatctgtcaccatgttagcagagcagaaaacatttcattttaaatgattgctatttcagttacataataaaagttaatagatacaaccccaaacataagatttaattcattcagacacacatatacttgtgttagtctatgaaggaaatatatcttttatgtcaaaattatgtacttctttgaaatgtagttcaaagtgaagaagaaaactttaaacattttccttcacttttaactccttccatgccccaaagcaaacacctgaacatatgttaaaatacttgaattcatagctgccatcagtaatgtctttattcattcagagattttacttcaatatccctctgttagactttttcctgaatgttgatcttgaaaatctgtaccgaaagcttaagtttttctccaaagtcacattcaacttccatagatcatatcagaataatactcctttgatatttacatagaagcaaatacaacaatatctctataatccatggataatgtatatatgctactatagatagctctcattctgaagatatttttcccaaggcacaaaggccatcacataaattcacctgcatttttagagtggatgttcagggcgatgtcattggagaaaggctatgctcccagtgactgtcacggacaagtacagagtcttgagtaggctctcaacaaatgattgttgtgcttattaattgaagaagaatgatcttatatgtgaatcagaaaggaaggaaattaggagtaagtgacaacgaagcaagtgatttgtgaacattgtgtccgaaagagaatctgaggaaaagggtgttttgaggttagtagcagggctgacattgaatctgagttccatgcccagcagtgagccacaccctttccttactaaggaatctggaaatgttgccagccctgccttttatctttgaaaacacagggctatttatgtctaaacacaatgcactgaatttaccttcattggttgacacagttatctttcctgatcctcaaaacctcaacagacagcaaagtgcacaacttgctatgtaatagaagtttggtagatgggaagtctacatgcaaagctgatttattttggcaagataactcagccgcaaggggttacacggaaggcagagagaatggatgtaaagtgtagtcaggatactactgagaaatcctagtcaaggatgttgcaatagcctgtgaactaggaaaggagtgatattgaagacgtgtatgtaagtagaatcaatgagtagggactaagttggtatgaagaaaaattcgaatgcttgtctaagattctaattctcagtaactgggtggcaccatcgtcaagatccagccctgggaaggaagagcagggtgggagttggaaagtgagttttagacgcattgaatttgaggtactcagaagacattcaaagggaatgttcaccagcttcttggaaatgtgagtctggaactttcacaagagatcagggatagagattagggattatcgtgaaggaagaaacaggtgaactcagggaagattacagagatttagacgagagggacagaacccaagggagtaactttaaggttgggcaaaaaaaaaaaagggcacctgtaagtggaattcagaagatgtaatcagagagactgaaggtaaatcagaagcttccagtgtcacagaaggcaaaggggaacagatttcatgaagatgcgagagtcagcagcatgtaatgccagtaatctaaaagacttgtctccacatttgtttccaataccgctttatgttaattatgtaatatctggtttctcagctttagtaacaatgacatgagaaaattcaaaattattttttgtgtcatttctctcagtgtgtttattattatttaaatatatttatatgctttcatgaactttacttatgaacgagttaagaacatggcatcccaaaatacaccactctggcatattcagtatttttagttaaaggcacttaagaaaaaccaggtgaggtcgggcgtggtggcttatgcctgtaatcccagcactttgggaggctgaagcgggtggatcacctgaggtcaggagttcgagaccagcctggccaacatggtgaaatcccatctctactaaaaatacaaaaattagctgggtgtggtggcaggtgcctgtaatcccagctattcaggaggctgaggcaggagaatcacttgaacccgggaggcggaggttgcagtgagccgagattgcgccactgcactccagcctgggtgacagagagagactctctcaaaaacaaaaacaaaaacaaaaacaaaaagcaggtacaagaagatcactctgaccttccttctgtttctgaaaagcaggagatgacattcccatgtgaaaggtgtcctcccttggccaggtgggaggcatgattcctatgggcaaggaccagaagctgaggctgagggaaacctgtaccacctgctatactggcccttccttcccagccattctcctccaatcacctgccctggcccaagcccccgaccccccacctcatcacatttctgcaatttactgctctttgtctaattccttatataagtggtcaatacaaactgcatctttgggtcttcacaaattctgaaggttttcatgccacataaacttatattaaataaatgtatatgtttttctcctgtggatctgtcttatgtcaatttaattctcaggcacaacacccacgtgccccatcccctaacaaatcctaacagaggagaggtataattttgccttccttacacctagaaacatagaaaccatcttttctttgaatttaatgatttaaaattataaagacttttggcttgcactgaattttcagattacatgtgaaattacttgtaaagaaaaattattcaatattatccattttgtcaaaactcttaaaaagatagtgatgtctaccagctttcgcattttagcataattggaatgagtctatggataaaacaaatagaaaaaattggaataaaaatcctcaaaattaagcactggttcctgccaaatggtaatgaaaagtcactagctttttccaataacattaaggaagtataaatattattaaggaaaagctgtgtgtatataagcttttctgaataaattaaattacacgaaatatataagctacagaatgaagtctttatattaaaaacaggtagtcctattttgcctggtatcgtgtcaacaggaaactcaagcatatccagccatatcactgctctccatagtcctgtagcaactgagaggactgcttgtctgttttactcacttttcatacatttattacataaattctcttaaaacagaaatcctttcttctcaacctgttgacccaaaaccagtgttaaagaggttaagataatgtatacactgctagattcaaagcccattataaattttcataaaacataatgacaaactatttgataacttaaagagtaaatatcagatttataacaatgccatacaaaaagatacacactacaaaaaccatcttgaatgtaagtttacaaaagatgtttgtctgctaaggaactaaattcattttctctttgaattcaccatttatagaagttttgagccctagaccaaaaatatggaagtataggccaaacattatactatctgtgataaattttcagaaaatttgggctgctttaagtaatgtatttatgttttacatagttcctcaatgttagcagctgtgaaagatatttacaatttacttcctatgtagaatttatcttaaatttaagaaatagcaaatagagggaaagatgttttaatgcaggtctttattgagtcgttcaaatgatgaagagaataatataacaaatgtccatgtacccatcatttatcttaaaatagaagatactaattcaattaaagcctgctgcacatgtctctaattggaagtgccttcctacctccagaggtaaccattatctgaatgtaatatttatcagtccatatatttctttacattatgatgatgtaggtttttaatgaatactctttttaaggttaaagtaattccttcctttgtctggttgtgagtttttatcttgaaagcctgtgttgggtttcatcagtttttttttctgcactgattcagactgatctacagtcagaatgtaaagttttaaaccacaaaactcatatgattcatatatggtggtgaaatgccttcaataaataaatgaagcaatatgaaaagaccctcatgaaaatattttattcaatgaaaatgaaattgctttaggcattaaaagtagttatctatggtcacctaaaacactatttggttttactagtgaattcctcatttccttcctttctgatttatatgttagataattcttaaattaataagcacagctgagggttaaacataccaaatagtcttctgccaaatgtttttacacctgtggttttaagtattttagaatattgattagaaaaattatacatgtgaacataaaaaattatgatgtggacacaaatgatttttaacatcaaacgttttttaattttgatatccaaaatacataaaaaattgtaaggggataaaaatctcactgcaatcaagctttctcacctttgcataaaaattatcactttgatttcagacaagtttttacaagctgtggttattaagaggtggatctcaccatgtgagacaaaaaaacacgtgtgtgccaattctaaattaatttccaaatatgaaatacatccgttaattcttaaagatgctcaaacacaaaataaaatatattttgaatgtagacaagtaggcatcatcaatttttttaccacagaaaaaggtagtattttattactttttccacataaaagtctacctctgaatttaccttttcactcggcttttcatttttacttgtttttttagttttccatcataagccagtcttctattatatcaatacaaactttataaacttgtttacacttaatttttgtcttattctgccttgaataaaaatagtcatagtggatataaaaagaaaattctaatgatttaatttgatgtcagaaatacaatttttaaagaaaacatcgaatttctgctgctaagagatgtcactctgtaagttttctccaaaagggagtgttttactgccctttacaaacagagggaaaaaccattttctacttcagaatgaggcgtggatcccttagtctgacatctgacatccttcttgaatttgcactgaacctccatctttatctccaacaattcctggctgagtcccttcactatgggcctactcatagatgtgcacagaaatgaaccatctggtgtgccaggccacaccttccaacacttggctctgctgggaccacaaggatgggctttctcatctcaccgtacatttagatggccatattgggtttcggatagtctcccattcttaaccatggtcttcaacagtttttgttttaaaagtgaatactcttatggtaaaaaagataaatgtgaaatagaaaatactgtagatctacagatcaaagttatatttgaaaaccacatttaattgtatattcacatatttttgtaattcacaaaaaatatacccatctgtaacttttcaacattcttgagtgttttgaaaattaacaatttgttctaaaacttgagagttacatagttttgaaatatttcaaagttcagttcaaacacacacaaaactcctggataccacctggagctaaattcaataccaatcgaattttttaggtttgcaaaattgaactaaagaagtaccactgagttgagggcatgtcaagatctagcattaaaccaattcagatttgtacttggaccagcatattccaggggtcacagtagccaacatgcaatgccttaaaaatacatgctgtacgtgtgtttttctattaagctaaattcaatctctttttttttcaggcataaatttatttgagaacaagagaataatgtttctattctatcctttctaatatcaagctggtctttaaaattttttttaaactgtgtcaatttcctaactcgattcttttcggtatgccgacaggttatttcaaccagcctcgtcctaacatttggctcattatactattggcacattcatgtctttctctgtaatcttcacctcccgtgcttgtttttctctcagtgaagtacagaaagccaaaacttaggatttgaaatgtcgtcttcactgcctggaccaatggttttcttgttttattgaaaatgaaagagctggccgggcgcggtggctcaggcctgtaatcccagcactttgggaggccgaggcgggcggatcacgaggtcaggagatcgagaccagcctggctaacacacggtgaaaccccgtctctactaaaaatacaaaaaattagccgggcgtggtggcgggcgcctgtagttccagttactcgggaggctgaggcaggggaatggcgtgaacccgggaggcggagcttgcagtgagccgagatcgcgcccctgcactccagcctgggcgacagagtgagactctgtctcaaaaaaaaaaaaaaaaaaaagagaaagaaaatgaaagagctatgcatttggtgaaataataaaaacacaacctttcatctctgataatactgagcattaaataaaattataggtgcaattattttacaggtaagttttactttctaggacaaagtctagatacacagggcagtactgactgccccgaggcctcggtctctgcaccaattggtctcatcttatttcaagtgctctcgtctttgtcctcctcttctcagttacatctgtgtaacagggtctgtccagcgtttcatttctctaatcaccttgaacattgctcagcagtattactaacacatgagcctgatggtgagacttttgttctcaataaataaacacaaactcaatgcaccttcccaggggctttgcatgggacctaaatattctttgagtcctgagttttctctcctctgaatctttgctgtccatcaccttctgccatttgaataccctcttatccaaaccaaaatcctaattccagtacagcttttcctttgtgataataccactgattttctagtacaatatacgcccagctcccaattccagctctgagctcctagagttctgggggacttcacattgcccatcttcttttgcagagtgttatatccaggtgtatgtgcccagctctcctaccagactgttcatctgcctgtggcacggctccttgcacacagtacgtacaaggcttggtaacagaatcccatgttcattgaagggcctagactgatcacattttaaataatgcacaatgttctcacgtctatttaaggaagaaacaactgatttctatcttttaagattgcatttcaagaccatatcaaaggctttgaatctctcaccaagactaacaatgaaaaacaaatttggccaagtgcagtggctcacacctgtaatcccagcatcttggaaggccgaggtgggtggatcacttgaggtctggactatgagaccagcctggcagcctgggcaacatggcaaaaccccatctcttctaaaagcacaaaaattagcttgcgtggtgacacgtgcctgtaatcccagctactcaggagggtgaggcacgagaatcacttgaacctgggaggcggaggttgcagtgagccaagattgcaccacagcactccagcttgggcaacagagtgagactctgtctcaaaaaaaaaaaaacaaaaaaacaaaaaaaaatgcaaatttgatcatatttaattgaatttgtttcaaagtaagggaaaggggagtatgcaagggcgacatgtggcctgttcttctgaaaaagcaagaaaggttatctttatacaccagatcaaggtattgacagctacagagtgaaattccatacacaaaaagaaaattttcttcaagtgaaaaaagtaagtggccaataaggtcacattcaaaaattaaaaatggatgccctggtcttgattactgataccatttttcaataaaagtaaccagagctccttgaagaaataattgattttaggactaggacatgaaatgtacaaaatgatgcgggagcatcttgtagtaccagggaaaaaaaaaagtcaacccttagcatgaaggtgtaagtcaaaggcacatgggagactggagatgcattttggatttcagattttttcagattttggaatatttgcatatccatcctgcgtcatcttggggacaggacccagatccaaatgtgaaattcgcttatgttatatgtagtgtatccaaatagcctgaaggtaattttatacagcgtttttaataattttgtgcataaaatgaagtttgtgtacactgaaccgtcagaaagcaaaggcatcaatatctcagccacccacatggaaaatctggtgttgtttggcatcaccatcattcctgactgaatttatttgctaccaataagcaatcattttcctgctcttactcagacgtgagtacttaacagtagaaaatactactatttttgtttttgaaagagtcttgctcttgttgcccaggctggagtgcaatgacaccatctcggctcacggcaacctgtgcctcccgggttcaagcaattctcctgcctcagcctcctgagtagctgggattacaggcatgcaccaccatgcccggctaattttgtatttttaatagagatggggtttctccatgttggtcaggctagtctcgaactcccgacctcaggtgatccacccgccttggcctccgaaagtgctgggattgtaggcgtgagccactgtgcccagcctaatactactattttttaaacagtaaagatacatcctattaatacagtgaaaaataatgtgtttaggtaactgggcagcacaggaaaaagaccgttttcctttctcagctgttagacaacagcagcaacaaacaatgcaggctttcagttgccacctatgatgctgtgtttggagtaaagggcactgtacactgtattttttttcttttttaggtgataagaaacatctgaagcagttgacagatcatgaagcgggtcctctgagaaatgagaggcattctgccggatggcatttttttttttttttgagacgaagtctcaccctgtcacccaggctagagtgcagtggcacgatctcggctcactgcaacctccgcctcccagtttcaagtgattctcctgcctcagcctcccgagtaggatggcttttaaaatgttttctccagcgtcatctgcctcattaacagcgatttttgtcttagaagtctctctttgagtttctaaatggacatgactgcttattctgttaggaatgcactccactctagtccttcaattagcccatcacattgtcactgtggcatctgtatgcacattttctgccgtgttaatgtcatcttcattgtccaattgtggcatcatgttggtgctcaaaacgttgcagattttggaacattttggatttcggacttttagagtagagatgctcaggctctactacttcttatttcagagaaaaacataatatccaaataactaataaaaacttggttggagaatgcagacttctagaaatgactgtttaatctgcttatgataaataatcctctttgctctactgcaaaggggagactactgctgttactgttttgtgtcatcatgtcctgatcagacaaacactgatttaaaaaaaaaataaaacaagtacattgtatatgtaaatttagactgtaataatatatccttgagaaataaatattatatggactccatttttctctgacagtcaattaagcacaaaaagatttttaaagcactgatttttgcattcttaaatgacaaatgaagtcttcttgaaataagatttttaatgatttagagaaatatttgcacatacactagcttggtgttgattctcaatttttaatttttttttaatcctttccctggcattttcatcgtttccttttttttttttttttttttttgagacagagtttcactcttgttgcccaggctggagtgcaatggtgggatcttggctcactgcaccctccgcctcccaggttcaagctattctcccacttcagcctcccaagtagctgggattataggtgtgcaccaccatgcctggctaattttgcattttttttttttttttagtagagatggggtttcaccattttggtcaggctggtcttgaactcctgatctcaagtgatccacctgcctcggcctcccaacgtgctggggttataggcgtgagccaccacgccaagcctatccttcccctttttctgttttgttatggatgatgaatgtcttaaaactactgaactccttataccttgatatggttagtgagagcttccttgtgggatggttctgaatgattttctctagaacctccatttgaacatcttcctttcctctgctcactgtaccagtctggggctatcaaatcacatatgctgataaatgctacactatgactggtgaagccagtgctaaaaagcagcttctacatatggcacttccaaattgtgttattgctagcttttccagtgctttctctactagggcatccactgcatgtcacctgctaaaatgcaaaccacatctttaatgaaagtctgttttattgaatatataagtgactatgaaatttcaaaatgaaatttgatggcaatttaattttataataaatctatatctatgtatctcaccaaagatagcctaaatctttagtgaggccacacattcatttttatgaaaattcttcacatgagtttagaaatctcccaactaagaaaaggacaagtcagatcttagtgtcctgggtggcttagcatttcataactgccagagaaccatgaggaccttcctgggactgactcatgggagttatctgcaatgattttatgtttcccaatgggtcatattttcattggagattatttactatgcctggaatcctaatgcttggtgtctctaatgagaaaaataatacaaaaaaattcaatattcagccaacacaaatttatatgatctacaaaagaaaggaatgttttcagatcctgggcttgattatttttgttttcgatgtgacagatttgctgaacaaagcttacaaatctcccttttcctctctgctcgctactaccccgacccagaaaacacacacacaccccttcccaaccggggaccatctgaccgttcacacccacatcaactctgggtcgccatgcttttctgagggacattgccttcactgagagctcctttattctcagtataccttacattcccagccacagtactgaacttctcaatgcttgcaatgttcccttggagtatatcagttgagcaggcggaaaaaaaatatctggaagtttattatttttccaccaatatatttgacaccacctttggagagggaacaaaaggcatactgtcaagcggatagacctggacaaaatgttactgtttgttcctcacgagcacagaggtatatttaagcaaagaaaggcattccacggctctcccgggacttccttccttcagctgaattataccaacatgttcacaccactgagggccaggctgctggaatttaaaacgcagacctctatctgccagtgcttcgatcccacggctacaaacattcacattaggattgaacctggctttcaaacatcatgagataaatgggagtttactgggggaaaacgtgtgccctcatgaaactatagtagaagatgcggaaataggactgtccctgttcagcagattctatactaatacaataaagcctcaaagtcaccagaagtcacctggccttgggttatgtttcaaatccaggctcactgacattcatgaaacctttggcaacacaggccaagtttcgtgcaaggctgggtagaatacttctttcatgtggaagctgggtgaaactcggtggctttggctagctttcacctgaagtttcacattcaaacaatccaaagtttcaacgtaaaattcaggggtgaagagaaacagaaagaaaaaaaaaacaaaacaaaacagggggaaaatggcttgcctgggaatggaatgatcacctaccattctccaaaaagatttcatcctggtgccatttaattttgccgctggactatcacctctagcaatatatttgcactcagccctgcagaccaaggcttcccagtactaagggagagtgagtattctagctagacgcaccccatccccccaacaaagcccaggctcaaaataacgggaggatttaaaatggtaaccatacacataaatgcgatgattgacatgcttcttataatgtagatttgaaggggaaaagtggcaatgaaatgcccaggtttgggaaacttaaagattagactgaacatctctaggtttttctactataaatccaagttctggagattcgattgcatctgctcctaatccagggagatctctgccgtagctttctccacagctccgcccctttggagatttgtcctgtggccacttgcgtttgtccttcttagcaaggtgcagaggacggggcagactgcgtcagcgctgaggagctagcgtccttgactgggacttaaacagtctcctgacaggattaggctcattctactcctaaccttcaacagaacacgcagggaccgtttgccagggaacgtcaaactctgtatttggctgaggactgtgaaaataccttgtgcttggggtgggaaagaagaagggaacaaatgtcacacacacctgtgctttcttcacaatgaagagaatattccaaagctgattgaatggctagtaagtgctacattttgcccattttaggaaatacatttttaagaaatcccttatcccttacacagcagaagtttcactcgtaaaacagacttctggctactaaggttttttttttttttccagttttcttttgattctaattttctttttctttgttatttcttcccgtttttgttactcagacgatccttatgtggttaaaatgcatgctttcctttgatatgtgctctgtgataccaataaacttttctgaaaaaaaagtatttctgaactccaaagatttcagcatccatgtttttaaaaagcaccagttgggccccaaggcacacggagattctgaggcagcagggcagccagcgcggggctctgtgcactctcatttgctgcttgctcttacacatctgccagacaggggccatgaactgtcctgaagtctgtgttggggagaactttaccagagaacacttttcttacaattgggggtccctctagaagtgaaatctaagacagatcagtgaggaaaactaaagctccaataaattgtttaaaggaaatgctatgaaagcattaaaccaaaaggaaaaaaaaggagactttttactgagcatagtaaatagccacaatcaaagtaaatgctgtgtttgaagttaaagtccacagatcaaagtacttcgcaaaatgtcaagtgcaagcgtaacgagggggagaggggagccacagaaactgacccgaagtatcacattgtcacgttagagaaacctgccagcagatgtacccagcaaaagacagtcagcttagtaaggaatcctcaacactgtcccctaaaatgtgctaggaacatacaaaacaacaataacaaaaacaaaacccccagattcccccaaatcaaccactctaattccacacgagcaatgaacgaaacagtgatgaaaggagaacattatacaatacggctcgctcattgcccttaaagaacaattacttatatatattatctttactcaggtggatggttgcatctttttcctctttttttttttttaatgcccctggaaagttaaaaataaagcagtctaaacaacaaaaatatgatgtctgaaacatcctctcattgctctggcaatcaggcttaattagacctctgatccatggcttagtcatagtcaagcgtgtactgcaggtcactattatgagagctttaagcaaagtttaaaacttacagccacaaaaatgcccagatgctcctgctgtattctggaacaccgtgtttacctgaaaattgttcacaactccccttattattttcactataagtaagttattttaaagacattagttatgaacataccagaaaacaattaaataattccagaataaaaaatcttacctacaggcagctgagttcaacagttgctctatacagaggaagtaggagtcagtggccttttacatgtagagattgtttatttagccctttttaaaaggtcttgaactccagaggtttaagattaagtccaatccaagtgtctgaaggaaaaaaagcaagagagaggcaaatgagagagggaaagaatcccagctgctgggtggtgctactgttctgagagcatttgagctattttcagcattaacagcagccggggttgtctgcaaagggatgaaaatgccttgcccagatcgccaccccccactccaggggggagaaaacaccaaccaggaaacccacaacgacttggttcattgtgcaaatattcatttaaattttgaggaaaactgccagcaccattgaaaacaaaacaaacccaaagttgactggaatcttaaagaaacacagtgctcctcaagttttcaaaatgaattacctgattcactgaaaacgagatgtcctacttatgctttattgagaaggaggcttttcttctgatatttcctagggggtcttaagaaatagttgagagccctctggtagcagtatctgttgtcagtctattcttaagactgaagacaaatgatttcttaaaagagcccgcacctaaatttccagtttcatcaactatgctatttttgaaagctactgggttaagcgttgacatctcttatctattggcagagactggggaccattcagtgacatgaggcagacaaacagtgacccctgcttctgcctccacaggccaatgaagaaatcattctggttgggtcactggcaatgactgacaaactttgagccttcattttgtttctagaaataaaaattaagaagtcgtattcattcattcattcagcaaatatttatttggtgagcacttcagagcttactataagccaagcactctgggaatacagtggtgggcagaatgaagtgtccttgccttcaggggtttagagcacacagatgcagtgagaataaataaaaacagaatttttaaatattttccagactttttcacatgatgagactattcacatcatggcagctgaagactgagatctctttctattgtggatgaaggaagatactgtgtgtcatcagaccaacttcaggcttccattgagtcattgtgcctttacaccaccaccagggaggaaaattacttactttctaccaaggaagcagttaagtatgtttatgaacgctttcattccaatagatgaaatccctggtttttttcaaccccctactccccattacaaaaagaatgcttaagtagtcagaaagtactgctgagaggctttccatcgggagatgaaaagagagtcttcaacctgaattcagtataaaaaactgccggtggctcaggcccgtaatccagcactttgggaggctgaggcaggtggatcatgaggtcaggagatctagaccatcctggctaacatggtgaaaccccatctctaaaaaaaatgcaaaaaattagcaggatgtcgtggcacgcgcctgtagtcccagctacttgggaggctgaggcaggagaatcgcttgaagccgggaggtggaggttgcggtgagctgagatcgcaccagtgcactccagcctgggcaacagagtgagactccatctcaaaaaaaaaaaaaaaaaatgccctgatatattttataattaatgtgagggttggttgctagatgcttatatcaaattcaaattcaattctttctttgccattaaagaaagacactgaaatagattatggaaaatactgaggattatgccatgtgaaaaaaaagggttacatgactactacttcaagtactatttaaaaacagtgaaatcctttggctcaatagaccttatattaaaactgtatttcaaattaaaaaattataaattaactttgaaatctctaatctgaattttataaataagatcaactttgttttaaaaatgtataccaggctttaaaaaatgactctagaataaagcatttttcttttcacttattttaaatggttacattttactatgtcttaaatacctgccaatctaacatgggatatttgtttctcttggcctcaatgtggaatggtaattctactggtaataattggaagcctagctgcagacagacacattttttaattgtttttttctttttcctccttataatagtttataccaaaaaagggtataatgcatttaaatattggctttccttgagaagctatggcattaaggaaacaaagatcaacataacccactctcgtataaaacagggataataatgagttgtcatagggctcataggaataatgcacagaaaatgcttacctgggtaatgtctgacacacagcaagcatttggtgaaagtcagtaccatcatctctgctgtaagtgtaaagctttgctctccaaatatggtggctacatgtggctactgagctcaatgcggctagtcagaactgagatgtcatataagtgtaaaatgcatgctagattttgaggtctttatacaaaaaaaaaaggtgaatgatgagaaattactcagtgggtacgatgttcattattcaggtgatggacacattcattaaatccgtgactttaccactatgcagtccatccatgtaacaaaattctccttgtaccccacaaatttgtacaaataaaaatagattaatgttgtctcttcctaaaacatgtaaactatcatatcatttttatattgaccacacgttgaaaaaagaatgtaaattatgacattaatttttatattatgtgttgaaatgacagtattttggacatagtatgttaaataggatattttgctaaaattaatttcacttgtttcttttttactttttcaaatctgactgctagctaatttaaaattacctatgtgacttgcattctatttctactgggcagtgccatgcaggccaacggttctcaaaaggtagtgagcatcaatgacccagaagcttcgtaaaaacagattgctgggtccaccccagagcgtctgattcagtaggtctggcggggcctgaaattctgcatccctaacaaattcccgggtgattcttgacctcactttgaaaaccgctggtcttgggccttgcttcttaaaaaagtagtccacggaccaacattaacgtcatcacttaggatcttgttagaaacgcaaaacctcaggccccacccagacctactgagccagcatgtgcattttcacaacatccccaggctgcgtgtaaacatgttgaaacttgagagaaatgatatgaagtagtgtctgtcatccctgggtgaatataaggtaaacttttacaaacaccagtaccccggccccgcccctagagagtcagatttaatgactctggatgtgactcgagcatctgcatacgtgaacagctgattccagattaaagcaagcactgagtcccatcagactggatgtggaaaggccaggatctagatcatttgtacatcattaaggcatagttgacacagatcaaaccatattagagggtatttacatcccaaaagaggatcttgttaaccccaataactctacaattgttagaactggtgagaaagacccatattttggagtagagaggccttctgttattcgctccacctctgttccggccttaaataaacgagcacgccaactttaagagtgtgtctgaataacctcattagtttgccgaatgacttctcacattttcaggcggcacctgagcgttgtgtgtttcacagagcttggtaaaaataaaatcctcactgtaagagagaatctgggctcacgctggtaacatttaaaacttccaattctatatgcaaagaccatctgcagctttgcttctcactttcttggttgaacctttcagaaaacttttaaaagtgcataatacttaagagtagagtctggagtcagggtgcctgggttcgaatcctcatcctgccacttacgcgtggctgtggctgtaggtcacttacttagcctccccatacctcggtttcctcctctgtaatgagacctttttttattgggttgttgtgagggtgaaaattgttatttgaaacagccatggaaaaatctgctgctttgtaaattttatatgaatgttggttaaataatcaaaatatatttgaaaaactgtgcagatttccatatgtggctaaatttagtaatttttaaaagatactgtggtgatttccaaggactttcatgggcgtgagtttttgaacacatatatttagagggtttctctgagtgttgttttacatttttttcccaagacagcacagaattctcaattgattcctcatcgcttcctattatttgagaggatcccagtaggaaggaagtaaatgtagttttcccatgagtattgttttctagagaacattctttacccctgcagtcctttgaagagtgagttgtgctatagatgtttagagacctccctggtccctgtcattctagtggcattgtctagtatcccaggagaacaatgtgtcattctcttagtcaaatattttagtgcttagggcgaggcagcaagaccatctgaaacactggcgtgagtttcaaagacatattgaaacagcagtcagattctcctatagaaatcagctaatgctgactaaaagaagggatggggatgaacagggaagtgctgaagtcacgcacattgtaagcaaaatgaaggctagactaagtagagtaacatttttttttttttttttttttttttgagacggagttttgctcttgttgcccaggctggagtgcaatagcacaatctcggctcaccgcaacctctacctcccaggttcaagtaattctcctgcctcagcctcccgaatagctgggattacaggcatgcatcaccacacccggttaattttgtgtttttagtagagatggggtttttccatgttggtcaggctggtctcaagctcctgacctcaggtgatccacgcacctcagcctcccaaagtgctgggattacaggcgtgagccactgcacctggcctggagtaacaccttttatgcttgtctgcttcaaccacactcaatgaagtgaagcatatgcaagaaaaataaggatacctggtagctctgggcacgtagcaagcatccgtcgggtcatctacaggaacctcacccatggtatgccacctgctgaacaatgtaatgcatgcatcgggctggaaactaaagcccatacattgagtgactttagaccagtcatgcaagctccctacacttgtgtcctgaaaggcagatagaggcatgggactgcaactgccttactgactcttaaacctatgctttctcttgggcttatctggattacattcggcagtctgccatgatttacgcctttttgcagcactgtttgaaaggagtcaaatcatacgtccaatgacttctactgcctggttattgatgttaagtaaatactttttagtaggcgatttgtcatcacatgtgtcattttgccatctgggttgaggtttatcaagtgaggtgaaaatcttaacaaaaggttaaaggaccagtatcattgaaagagattatatagaaataacttcttaaaacctctgttagaagctcaattttctagttgaaactttgtttcatttatttatttttatttattcatttatttttgagatggagtttcactctgtcacccaggctggagtgcaatggggtgatctcggctcactgcaacctccacctcctgggttcaagcgattctcctgcctcagcctcccaagtaactgggattacagacatgcgccaccacacctggctaatttttgtatttttagtagagacgggtttcaccatgttggtcaggttggtctcgaactcctaacctcaggtgatcctcctgcctcagcctcccaaagtgctgaaattacaggcatgagccacggcgcccagcctgaaactttgttttaaactggctgcctgaattctttgtgtatttaaagagcacctctgctgtttatgtaaccatgacttagcttttcttgttatttctattccatttgaaattgagcatatgcaacagtcgctaaatctgctatgaaaattgtgaagccttctccatgtggcccactgaaggccctgcacgatctggtgttctgcagcatttctgcccagatctccaccaccttcctcccagtgccattgcctccagcctctctagcctcccttccattgcctcccgcctctccagcctcccttccattgcctccagcctctccagcctcccttccattgcctctggcccctccagcctcccttcccttgcctccggcccctccagcctcccttccattgcctccggcctctccagcgtcccttccattgcctccggcctctccagcctcccttccattgcctccggcctctccagcctcccttccattcctggactgtgcctcatccagggccctggcttgcctggctcaatgtgatgggaatgccttccctgcccagtggcgaatgccatgcagcctccagctttcacgtgtctcttcctcaggaaggacttccctgctccaccagcgtagccccgccaccccctttttttaactcgtaaagaatcaccttcctcattccttctaaattcaggttcagttgcttgaatttgttggagtaattgatcggagcccctctcctccactagcctatcagctcccgcttgcccctcacatgacttacattcctcccgcaggtactgcattctgcctggccctaagtaggggccaatacgtagttgctgaataagtaaatgattaaataagttctgccgaaggcattaagcaacacaagagtacattttttggttctatatttatcagaacttgtgaaataaaaagtatctgatcatgtaaaaagcaaaacattatgtattctaattaagcagctgtttccaaccaagacgattctctgaaacattgctttgtagctacatatttggtttagaagctgtcttaagaggcaggtgccacttgcttttcccttcaggatataatatgttctgttatcttaatttgcatttattctaaaatagatttcaataaaacaagttacttgcattcatatatcatattcctagacctttttcacaaccatgtgatactctactagggtagagtgaggtccctgataaacatttcttctgattagggttattgagagaattatgtatttgtctatatattgcctggcagttataccacctgaaaccatatgtgattatttataatgtagttttatgagcagacaggcagatataaagtaacacatcaaccatgccacctggtcaggccatagtcattccaatggtatgaaactctttcttgtggccatattatgcataagttataaacagacaatgaatggtcactgactgagaagactggagatttgcaatcttattttctggcaaatagccaagtcatgtcaacaggagagataaggagagttttgtgtgtcatacactgtagagcaggggtcaaagcctgggataggagagggcttggtcttcactgcatttatttgaaaggagctatggaaacttttcttctaccacttgggcacaggaaggcttgctatggcccaacaatgttttaaaatgtattctttacacatgtgtaaaacactctgaaatcatcaagatacagcatgaaacgtatcttttctgagacattaaaaaactgaataaattaatccaacaagccatggcacaattccataattactatgaccacagaagttaatttagcagggatagtacataatacacaccgtgctaggaaagtgtccttgaaactcatgacggtgaaggacgaattaagcccaatgaaggacagttgaccagcattcaagaggtagaaggaactatagattccttatatcaagtacatgagaaaaacttcctaaatgaatgaggctggaaacacaaaccctcagagactggacataggaatattttctgcgttgtctgtcttctaagcagactctctctctacttctacttctgtgttagcaacgactacagtgctgcagtaatatagatctcctcagttctcaggtggccaagtgaggccttgggaagctaaagttcctggactggccacctctggctgttagcaacctcattggtttacctctgtgcctgcaaatattcttgattttatgtatagtatattatagagaagtctggaagggaatgctttaaccagcaaagtcaatccattaaacaaaaaggtatgggagagacacgttaagagatcagtaaccatgttgtagtttaaaaaaaaaatgcgaagtctttgttcagaccctcggggtaagcagaagtagactggtctccagtggcaggcatgagagggaatatcctgcccgcagtgatggacattttggtttcaggcagagaggcaggaagctgccctctgaatcagagtaaatgctcacattttgaccttctagcaagggccctctttttcttggcaagaattccttcgaggatcattttcagtttgaggttctgtctgatgttttattttacaattaagtcactattcccatattcattactctgtaaaataagtcaagtaggtaagaggtgtggtagacacttccttctgcctcctgaggatccattttgcagccttcctcactacagaatcctgacagtacggccagttaacaactgacctgcctggattccttgcagtttctgaccaataagctaaaggcaaggcatcctgttgaaaatttcatatgcacagtaacgacactaacctcccgagaagagggcttccttgtccttttctttcttttttgagacggagtctggatctgtcgcccaggctagagtgcagtgacgggatctcagctcactgcaagctctgcctcccgggttcacaccattctcctgcctcagcctcccgagtagctgggactacaggcacctgccaccactcccggctaattttttgtattttagtagagacggcatttcactatgttggccaggatggtctcgatctcctgacctcgtgatccgcccacctcggcctcccaaagtgctgggattacaagcgtgagccaccgcgccaggctgtccttttctttctaaccttgttctgctcctctttttgtagactgaaatgcagatgtcattctgtgggggtgcatgctaacagagagatgatacagcgatggagagaggatagagaggaacctactctgggctacctgtccgtgggatttcttgttatttgaggcaaacccaacctggtgaaatgactgtattgaggtcatctgttccatgaaagctagaaacagaaacaaaacaatcatctaaaaacaaccttccttacattagaccggctgaacgacagcaataaactattaggcctgccattaagatattagttaaaaaatacttccagaagttttgaaagaacttctgggcatcaacaacgaatgcttacaacagttgtggcattaagtctccggcccattatcatttcctaatggagcaaaatctgccatgaaaaatgagccgacatgcctaacgccccgggagctgcatcatttgaatatttttgactctaaatatagtgaagtagttggctcttttttctaaaactacaatttactgatcagtgatatcaagagaaataagaacacagcagtgatcaacaggaaacacaaaacaggaacgcattgtttattctgttctcggtggacactgccagatcattgttcagagagctttcaacagggttgcttcgatggagtttagggagtttttaaatctaaattgaagatgaaatgtgtcctcgggacagaaaaagcaattttgaaaaggttattcaaggccataaggtattgactttgagcgtttaaaaaaaaaaacaaaaaacctgtaagaatcttactgtggtttcttaaaatggtgaatgctgtcagtcataatggaggggaaggtaggtttgattaggcggccggtgaattttcagagttaaacaaagttaaaaatacacaggcaacatgaaaattgttctaagcgttcctgtgtcatggtttctgattaagtatcatgaatggaagaaatgaatataaatcataacgattccgttttataacagacagtctcgtgtaaatattttgtctttctagtcacatgtgccaagagctgtgtgagagtgtaatgatggagagcgtggtctgtacttacccgccaccatcaaacccaactctattactgccagcttctgtggctgctacaatcttcttgggcttcagttctcttacccaccaaataggcactgtgtggcccttgactcataattgttgtgaggcttaaatgagttaacacatgcaaagctcttaaacaacagcaactcacaggaggccctccccacgtgttggctgaggctgtttccatcatcatcttaagagcatgggcttggagaatcaagagttctgagttaagtttctggtacttcctcgaattagctccctggtttgggcataatcgttgagcctcattttcctcatctgagcaatgggaatatcgttcattaccttaaagcattaagaagaggggtgaagaatataatgctggaaaaccacacctggcacactggaatcattagataccattttgtttacattacacggaaaaaaattatttgcaaattgatcttcaaaaatatagagacttttactttgctgttggggaaaatgaaatggattgggcacacctagatattgaatttaatttccttatcatttatttcagatagctcacattcaaagttttatgttttgggtttttttttctattttaattttaaacaagaatacatgggactgtcaaacaactggattaagaaaatccccatatctgagctaatcactttgtcctatgattgacataacagtctccttcgagcaacagcattaccactgcttcatttagtaagtagagaaggctaaagaggaaaggtagtggcgttaaaagaaatgacctggaagaaatagagaagaatggactttgtaaggccctgtgagagtctatcattcctctagcagggggaggagcagagttataatcctatctaccttgttacaaacaaatacacactaacttaacattgattgactatggttataatgaatggtaattgaagaagtatccctctatcacagcagtgattacattccaaggaaagaactgagggtttggaaccaggcacagctgatctcaaggcgtggcttctcccatggcaagccatgtcactttaggagagttacttaatctccctgagcctggatttccttatctataaatagcagacaggctgggcatcgtggctcacgcctgtaatcccagcattttgggaggccggggcgagcaaatcacttgaggtcaggagttcaagaccagcctggccaacatggtgacaccctgtctctactaaaaatacaaaaactagccgtgtgtggtggtgtgtacctgtaatcccagctacttgggaggctgaggcaggagaatttgcttgaactcgggaggtggagtttgcagtgagctgagatcatgccactgcactccaatctggatgttcatccatttttttttttttttttgaggctctgtctcaaaaaaaaaaaaaaatagcagacaaccccatctacctctctgggaggtttctgagaggattaaatgagactttgcatgaatattggctactccatcaagtggttgcagaggaggggttcagtaggctgttgttgctgtttacctctttttcctactacactgcaggctccttgaggataggattcctttaaaaacaaaatacaaccagttcccagcacagtggctggtcgctagaatgtactgagtgaatatacaccaaataaagcaagacagggatactttgaatggaaagatcaaacaacagcaataatgaatagcaggcttgacttgtttaagtgaaaatggttaagagagactggcgtggacaaactgaactgatgcattggggaacagattaagtaaaaagtacgtaaaagacaacatcttcttcacacacatatttagaagggaaagataagccgtaagggacagagaaactgttatacgacccgaggggattataaatagcatccttaaatggggctatttctatatagcctctctattttttactttgtagaaagattgaatgactttgacctatgatttctgagagctctgtctgatttcttttttaatttacaaaagtttttatataaaattcaggtcttctcatttctctctgagcctccctcctcccatctgtctccaccctatcctaagtgcctccactttgggtactcttgggttttatggctaaatccagcaacgcagattgtgggcgggcaggtttcccgtattgttcctaccgcccatttctctacagcatttcttaaatagggcctagtctggagactttcaggacgagtgttatagttctcacttttcatttaaccttgaatcatagctggaaagcacattacgaaacctaggtaatcatcccctacacattttgaaaatttgggagcagaagatgattttacaggtaaagccatgaccagcgccagggtctaagaaacattgttgcggcgaatgggcaggtgacatcacatggcgcaggcagcatgttccagatccagatctgagatgggagagggctttccacggggcctgccgggctgttccgtgagcaccagggctgctccagcgccagctgctgctttgttctgcctgggagcagctttgtcggagacttgctactcaaacccctcatgaactaaatgagctgttaatgctgttcgcaatcgtagactcattgaagtgtcaggtggtagcatcaatggagcaacagaaagaggttttcatagagaaagaaaagagataccgacagagaaaatggggtttgcaataatttcagtaagaatggattcagcgggggaaagaaattaataggctatatcctaaaaagaaaaacaaataaaatttggtgcttcaaagtttcaaattaggcacatttcagttgagtcatagccagacactcaagtacggcagtgtgatctcagaatcagtcaactatcaaaggagaatagcaccatttaagataattagaaaaatgacttcagaaatgagataatctcagagaggaattattcgtacaaggctcgctggtgaaacttctgaaaaagagaaccttgcagctgagttcactttatagcattatattagggtatacttatttggtgaattttataattataccctgtaatgaatcttacctgcaaagacagagaaagactcaattcaagccacccttctatttgcatatataacgttgggtaagagaagaaggaattggaaagctcttcaccaacggtgcccatcactgtggccaaacgtgggttctaaattgcagagcctccaccattctgcaacttgaactctgttttcgtgttacagattaagatctatccacttggcctattttaaaaacagttgcacacatttgaacacaccttcgagactccaaattggacttctgtaccaccttctattttcggtaaccacaagggtgctggaaattcaagtactaacaaacgccacgacctacaaacttaagaacatgagctggagaatacatgattcctgggccgcagaacacacctgcgctctggactccaattattctttggggcgtttgacttacagatcaaggaccaggtcaggtcatctttgtttgggatgtttatactcttttttgtgaagtcttcaacattgcattgctctttttcttaacactcaaaagtcagcttaagatccagtgttaaagcttatttttgtgtttctttgagattaatatgatatttccattttccatgagaaatgagactgccttccttctactcttaagcagtcctgtagagaactcctaatactcattcatctccactcaccttatccagattcgaattagctacaaaggtactcagggattctatgcaataattattcaaaataaagtcataacaattttattatttagcaaagtataatttatgaaataaatcatatttataagtataattaatatataattgtgtattagataatagagtaattgcttatcaaatatggaatatatttatatataatcaagaaattaaatataatttcttataatgtttaaatataaattattaaatataattttagcaaataaagtcataatttcattctatagtctcctctatttttatgtttaaatggatacattggtgtcctcagaatataccatttttttacaacagaatcattcaagagagacattataactttttaattctcttgatttttaatgcaatatttcattaaactccttttaagcattagaagtttttgaaaatgtgccaggtgaggtattgttaggtaattttgctgctattcttgcttcttgaccattttctcactgttttagtgcatttggaaatgagtttgaccctaagtttcttcctacctatataaatacttagaaactcttgtactgtttccaaatcaactggagcagtgcctccatgggctacatttgccgttatctgtttcactgagaaacaatatatctactgtagttaaaaagttcatgaatggtccttgctaatttctaggctgttgaaacatgtctctaatttcacagattttgaggaggcaagagatctggagttttatttctttttttttttaatagcatagtgttggatttattcaggatatgagaagacagtcatctgcgcacaacacatttgctatgaaaaaaaattgttaaactacacttatctccactcactgcttcagtggttatgttaactttgtcctgagagtagctagcattggggtaagatgtaaaacacaaaaataatgatgtattattcgatcagtctattaacccatactgattagtggccacactcaaaaagacatattgtagcgaaaacattcccaattctcactcacatgataaccaccctggctctacaagtacaatacgtgtatctttgccacttatctgttgaatgtgtactaatagcttcctccaatgaataaggactctaaacttcagggatcattacaaggtacctgaggagctgggcgactctacagttggaattattttcacattaaaagagccaagaaatctatgaactcatattttactcaatttatttgtgcagccatatataaatagatggtctattcatgtaaaagaaactattatttcaattctaagaatgttaacttcattattcataaactagtccattggtctgataagaaagcatctctcatctcacagacaaatactctaaaatatgtttatcactaaacaactggctttatttagggaacaattcaagattccctgatcacattttctgaaatgatccaattttgtcactcagcattgactctgtaccacagaaattgcattcctgttccacattgtgtcaatggaaaggaaggctgattttggtacttagctatgaatattccatactctctgttctctgaaaaatgtgaacattgagtagaaaatcatgagtatgggggaaaaataataaaatatatgaatgtgcttttaagagcatggcaatgtagtgaggcttattaaaatgccacttttcataaacaatttaaaaagtttctctaagtactaatttgggaaagtatgctaattttcaatacttaaaacctacatctgtttaaattagaatgagcacatttttgccacatgtcacattttattaccatgcaatggtaagtataaatttaccacctacataagaacaaaatatgggcaatacatttatgaatacattaaatgtttaagaaaaagcttttctgcacttcatatgatcttgttttgtttgtacagactcatgtttgtgagctgggcaagttagcttcagatataaggtatacatagaccttgggtgtggaaggtccaggagggccatgacttctgttttattcatatagcacagtgcctgccccatagaaaaaacctagctcacagtggagaaaagtgaatgatggaataatggacgtacaaagccagccaaggtgaggctgtacagtgtttatcataaacagtggatgttctgaagatgacctcttgacttgttttttatttttcttactctaagtgcctcgggtgaactctttcacctagcatgttaggactaatctgcaacgtggaatttattataaaagtgagtgctcatacttgatatttgtcacactagatactcttaaaaatgtgaaaaaaataagattgtttttcccccacaagtacatgccgtcagagtaaccattttcttctttagatcagagtgctaatagtcaacaaagggaaattgttcaacatgtacagagccccaagactctggattccttttaaactccatgtgaactgtatttggttccaaagtagagctaatcattcttaatccaggggtaaaaccaccactgccagtaaacagacaggccccctggcattgaagatcaagttggtgatgatcagttttctaatgggacagcttctaaataatgtcccaatttaaaattgatgcaaattttgataatggaaattgacaaaatgtttatattcagagggttaaaaatttgttttctattgcttagtcttgtggcatcctagttagatgtctaaacatgattggtgctacctaaatttcctttggccccattctagatacatctccttattttgaaattttcataacgttaagtagatttagaaaatatgggacggcgtggtggcttacgcctataatcccagcactcgggaggccaagatgggaggatcacctgaggtcaagagtttgaaaccagcctggccaatatggtgaaaccccgtctctactaaaaatacaaaaattagctgggtgtggtggcaggtgcctgtaatctcagctcctcaggaggttgaggcaggagaattgcttgaacccaggaggcagaggctgcagttagctgagatcatgccactgcactccgacctgggcgacagggtgcgactccatcgaaaagaaaagaaaagaaaagaaagaagagagagagagggagggagggaaggaaggaaggaaggaaggggaggagggaaggaaggaaggaaagaaaatatgaacaagcaaagagaagaaaataaatcttcagaaaaaaaattgttgacatcctagactgttttttttcttcctccctctttttattgtcgtgctatttctgatcttgaggatacggaaatttggtgttcacttataaataacggtttccatagagcccatgagcaaaaaatacagagagaatgataaaatgagaaatgtaacattttcttttggctgatctgtagttcccacaaatgggcagtctagaaaactgttgacagtgcagggtttggaatgtggccgactcaagctggaatcccactttccccacatgtgtgaccctgtgcaagttgtttaacttctctgcgcctgtttcctcttctgtaaaatgagaataatgtactcatcagagcgtttgtgtgaatagtcaatgagaggtatttaaagaatttggcacgctgcctgacacactgtgcattgaatgaatggtggccattattattatttataagaatacttactgttattttactttcttaactaaccctgcagatcgcaaagctccaataccatgtgatgtgaagactcattttagatcagcccaagaaaaacaccattaagcaggtaaatccaaattctgttgggaaaagatcatatgatgcattctcaagcaagtgcttcaggattgtggcactgcagtctctactagcctaggcagtggcaggatggctgttctttgggaataaggtctttagaaaacagtgagctcccacattctatcctgtcatcatttttgccgtgaatactccacataatttatctccagatgattagtttgccttagtgcaatgtaattaattgggaccagaagatacaagagtgtgtttgttatactctaatgaagtttctttgagttttaagttggacttcaacagttaaagaacaacatgatcacggaaagtcaaatggattgtatattaagaagatttttatttatttatctattatggaaatttatttttattctgtgtatttttttatttttgacccagttgagccttgtttggtcaatacctctgggagatcttgacaaaacaaagcgtgtctgggccaaagatttcctttccatctctggggattttttttattgatgatgaagttattatggactgagagccagttatgtgccaggccctgtgaggtatcctttgcacaaattacttcatataagagaacgactggtcctatgatctatgcacagcatccttcttttacagagaccaagcctgtggttgaaagatatggagtcacatggcagcggccacacctcctcgaaagctaaatccatgactgggccttggtccccgcaggctcctgcctggcctgccccttcctgtcctgcaaaattggaaggacattggtgcagaattggaggagccctgcctttgacaaggcacatacaaagggaaagtctgtcaaaaagcatttgttttactttcttttttaaaagaaaaaaaaatactgttatttactgacttttaaaactaagtgaccaaacattggtgacataaaattgtttcttaagtataacaaatgtcacttcaaattgttttttggattttaaaaataaccaggtaaagaaatgacgttagggtggggagagagggcagcagaaagagagtggagagatggagaaggaggaggagggaggaaatccaggcagtgggtggggcacggccccactgatgagtgtctgagccatgggcgcttggtgctattcagggaggcaaggtcctatgttcataaataatgtactacagggacagtttgaaagtgatcattaaatttacatttttaaggcaggggagttgcagtcacagccacaaatataaaaatctaaataaggtgtcttcaagcattgtcctgggacaagaactgcagatacatggcccagcctcaactctctagatatcctgctgatctcagggaattcagatggtgtttcctgggtccagttctcccccgccacccctctgaggaagcccaatctaaagcatccatgttggatgcttttaccatgacaaggtgtggagaaagaggaatttctataagtagaatgataatgaggagctgccagatttctagcaggctggggactcggtggttccccttgacatgatgcttctgggcatgactgaggtcctgggtgtgtgactgagggtcagggtgatggtgtctgagcatgattgaagtcctgcctatgtgaggaatgtgggaaggatataacaggactggtgcacccagacctctggcctggggagaagctgctttcacctccagccaggaagagtggctcccagcagcaataccccacagtaactcaaagtcattaatcatctcactaagtaaactgtgtttgattcacagtaggcaagagtgttcacagatgatgcctaaaaacacaagtagtgtgtataggcgggcttcatgagcttgcaaactgagcatgtgcacctgaccctgtgcttagaacggccaggtgttctgtttgataccctgctgtcatcatctataacttattcatcatacttttggaattgccttttcatcttgcgctgggccctgcaaatttatatagcagattcttgttgggtaaatttcaacagagataaacaaagtttccaaagtttctgagactccaatctcacatcctacaccctcaaaaatagaagaaagaggtcggggcagcttcggcaattccttcctctctcctgccactgggacaagctcacctctgctgcaccctccctgcctcagcaatctttgatctgtaccttcagagaaggtttttatcctagtccatccccagcagacacctcctgcccagcctctctctgaaggtctacatggcaaccacgggctacatgtggctcccgggcacctgccttgcttgcactgagatgtgttatcctgcaaaatacacacaagatgcgaaaaaaaagaatgtcaaggaaatcattactattttttatacttgttgaaatcatattttggctgtactaggttaaaaatattataaaagttggtgtcatctgtttccttttactttttaaaatgtggctgatagaacattaaaaattacataggtggcttctctttgctgctcaatatatttctattggtctagacattttttttaaaaccacatatccacctaagtgttccacctatatctccatctcagaaagtctcaaaccagtttcactatcttcttcccccaaaacactttttccatgtcttgttttcccaagacagaaacctggtgattaaaccatagcctgcttctactcccaaatgccagctgagaactgttggttctgtctccataatctctccacgccagcacttttcccccagccctactgtcctgtctcagctgagccattcatcttttcttcctggattactgtactgtcctcctacaggaaattcccttattttttttaaattttcttgtagagatgggatctcactgtgttgcccagggtggtctcaaactactgggctcaagtaatcctcctgcctctgcctctgaaagtgttgggattaacaggcatgagccaccccacctggccctatgtgaaattcttgaattcattcccaccctacctcagtggtgctctcacaacagagaaactatcttataaaggaaatcctatttcaccttcctgcttgaaatgtctcacagttgccctgccatctggctctggtctgcttgctcgattttactcactatctctccatatcgggcatcctgcattccagccataccaatggctcccagggccctgcagatttatatgaaatccatcgctccatgcctgggcgctgtggccacgctgctccctggtcacggtgaggctgggcatgcctgggcgctgtggccacgctgttccctggtcacggtggggctgggcatgcctgggcgctgtggccacgctgttccctggtcacggtggggctgggcatgcctgggcgctgtggccacgctgttccctggtcacggtggggctgggcatgcctgggctctgtggccacgctgttccctggtcacggtggggctgggcatgcctgggctctgtggccacgctgttccctggtcacggtggggctgggcatgcctgggctctgtggccacgctgttccctggtcacggtggggctgggcatgcctgggctctgtggccacgctgttccctggtcacggtggggctgggcatgcctgggctctgtggccacgctgttccctggtcacggtgaggctgggcatgcctgggcgctgtggccacgctgttccctggtcacggtagggctgggcatgcctgggctctgtggccacgctattattccctggtcacagtggggctgggcagcttccagagcgaatgtggacatattcttaggccccacctcacgcacttcttcagagaaacctcagaggctcctccacaagccacgggtacccccagatttccctcactctatgcatcccatgcgcctctagcaacgcaggaccacactcgagtagagctgtctgtgccgaagactgtttggcagacactgtttcagatgcgttccagacacttaggagagcgactgacacagagcagggcttgactgattacatccctcgctcatttctcccggccccgtcaccttagttcatgcccaagttttcctcttgtcgaattcatcgacactatcatttcgtaatcttttcttgtgcccttcatttaatttgatactgttaccagttatatatttttcacccacaaatatgatcattacttttcctctgtaaagaagctccaatggttctctctctttctctctttttctttccctaaagaattaacccaaactacttaacatgatgatgatcctgatgctgatgacaaaaataggcatgggtggccattcattctgcctctgacgtgccaggcgctatgccggtcattttgcagtaatctcatttaatcctaatgataatactcagatgtaagtgctattatctcttccccctaagtagggaaataggggtcaggaaaagcccaggagcctgttccccaagaccaagttagcactacagagctgggaatgaattccaactttatgtgactgcaaagctcttccatgcccccacaccaccccacgcccggttctccctactgttcctacattccagacgcaccatccagcctgcaatgtgctttcacaccatgttcacctgcagacaatgctttctccatctaatgcccctgccttcaccatgcacacactgaagttgcctagaagggtcagtcacactctactctgtgccttccttctgcctcggcacttgtgatgctgcgggattatcagtttcccctccctcatcccaaagactgaacagtcaccaagagtagcaagtcgactagtcaccactgaacatacgcagcctggagaatcagaggtgcacggtgtgtgccttttacatgaactcatgcatacaccaagaatgatagtaatgcctgctcacatttgtttagcatctcccacatgccagacctcaccctacacaattagaatacataatccattcaatcctcccaccactctttaggataatgtatcatcttaatccttatttattttttccagaataaacttgtgattctaacaacttcaacataaaataaataacttttgctcaatatcaaactctataaaatcactaaaattggcccaatatcctgggttttttaacttgcattatttcttcctgataatgacatttaggccagtcaaatcctgtattaccgttttaaacaaagaaaaaaagattatgagttgcttttaaaattcacgtgtgacaagcagaaaaaactcgtggaggcagtttcaacatttaacctaagtgtacttagcaactacacttaatagctttttaaaaagcctcgtttttaaaaaaagtggatctttctttgcagagtgacttaaaatacatcatcatagtcttattaattaaacatgttcttatcagaaaaaagcgtctcgaaagctagtatatatgcttaattaagctgtatgcaaccatcagtccatatcttgaattaggctacatgtgaggccctgatttgccccattctttctgctacccagaacagcactgctcactgcctaccagtgtttccagcaaagatataaagttctacatgtctaaacgtttttgccctgatatcaaaagcaaagcaaaacaggtcttctccattcccattttggttaacagcatcaccatctgcccactggcctgatccacccagaagcctgtcttcttttttgaacttgaaatactcatgtgctttatttgtataaattcccattattccctcactgctccaaaaatagagaagaaagtaacataaatgtactgacatcaatttgagaactagaacatgttaccttcccgaagtatccatcttggatatagggaaggagacttagcctcataaaagcacatgaaggaatgctcagaggaaatactctaaacctagttttctggaattggtaagcagaagctctggagtcagttacaggttgtgagccttccaccaagaagagccacctaacataccaaaaaaataagcatgagattcacttaaagtttgacaaatttagcaactcctttccattgtctgcattttagagaacctattgatgctgttgtaacagctacagagaatcgtgagatgcccagtgacattggctatagtggtagcaaaccgggtagtgggaagttttctaacaaatactatgtaaaaggagaagcctgagtcttttaacaccacagatcaaacactgcaaatggtaggacgagcattagagtcccgctgaggtcgctgagacttacacttcacacgaattgtagtggtgcctagatctccctgaagagtggcagaagcagccgcccatcccttaaactacacatgtacctggcttctcaagactccagagtttacttagagatgagtaactagagcacaggaatttggaagagagtctttctataaactcccaggaacaaccaacaccagtagtggctgacgtctgtgagaccttctttgcgtcagatgcagtgctctcatcaacatccaacacacgtgcctttaatgcctgggactatggcgacactcatttagatgagggaactgtggcatagagggtttcgtacctcggcttacttcactgcaatcggctttctaaaccagaactcccacccgacaatgtgtgagtccaaagtccatgtttctaggtgcagtggctcactcctataatcccatcactttgggaggctgaggcagacggatcacttaaggccaggagttcgagaccagcctggccaacatggtgaaacccgtctctgctaaaaatactattagctgagcatggtggtgcacgcctgtaatcctagctgctcaggaggctgaggcaggagaattgcttgaacctggggaggcagaggttgcagtgagccaagatcatgccactgcacttcagcctggatgacagagcaagactccatctcaaaacacaaaaaatacaaaaagtccatgcttctaaccactagcaatcaccctataacatattcccctcaatgaaaaagactgaatccaagaaatctcacctgcgtcagactttctaagtcatagagatttatagtaataattttaaatgagtctttgactttcagacccagcgtatgaaggaggagagtgtgagtcagtgccgttcctgggcgtccgctgggaacttccctgactgtccttctggctctcaggagtggagctcacttgctcaattcattccagtgtcccagaggtcacagtctcccctctgtgagctgggctgtcctcggtccctgggcctatctctttgctgtcctccctgggatcttgcccctggggtagccctgcttcccttgcagctttcttctctgctgctggtgccttccccagggctgtgcatgggcttagctctttcttcatttctctccctctctcctcttttcttcctgctgtcttagctgggccccctccatccttttatttcctaattgtacctgttgcttccatacccttaaaagcatactccattttctccctagatgtattgaggtataattgacaaagctgcagacatttaaggtgaaccacgggctgctttgatacaggcatgcactgtgcactgatcaccacaatcaagttagtgatcacttcttatcttttttgtggatggtaagaacatttggatctactcccctagcaagctgcaagtgtgcaatgtggttttattcactacagtcaccacgctgcatgagatcctcagaacttatttgtcctataactgaaagtctgtgccctttgacctcattttcctccccccaccaattcctggcaaccaccattcgactctgtttctatgagttcaacatttagactccacatataagtgagattgtacagtatttgtctttctctgtctgacttgtttcacttaccataatgtcctcatatgtatgctgttgcaaatggcaggattttcttcttttttagggctgaataatatcccattgtgtgtatatacaccacattttctttatccattcatccatggacaggtccttaggttgtttccatatttattcctttcctttgtatgtatatccagaagtggagttgctagatcatatggtagttctggttgtaatttttgaggaaactctgcacaattttttacaatgtctgtaccaatttacattcccatcaacagcttacaagggttcccttttctccacatcctcaccaacactcgttatcttttgactttttggtgatagccatcctaacaggtgtgaggtggtgtctcactgtggttttgacttgcctttccatgatgcttagtgatgttgagcacgtttccatacgtctgtttgccatttgtatgtcttctttggaaaactatctatgctggccctttgcccattttttaactgaatcatctctctctctctctctctctctctgtgtgtgatgctcttgagttgtaaacacatttcttaatctttccatgtgctttaatctcagcactttagcaactgtcaagaacaaagttcttttcaaaaagttcatctcaaagttggccactgactcgtaacaggtaaaacccaatgagcacttccctgagcctcagtttcttcttttctcatgtgaaacagtgatgatagtgcatacctcccagggctgttgagccagactcaacaatttacatgaaagcactgagggggtgccaaatacatgtgagtggtataaaacaattcttgatgctacaaagcttgcttttccacactattgtcaaaatcccaccttgttcgagccccaattaaaataccattttctctaatccatctttcccgatcctctaacaaacttcaattctctgagcaatttattatcatcttctggaactccattgcttaagacgatcaaagagtttctttattgtataagttacttctgcgcatgtcttttgaaggaataaataaatgcattgattatatctgccttatagcactccatcaccttctatcttaaattacagtaactagcgttcctgtcttcctgcactaaattgtaagctctttcaatggcttcctggcttattctctcatcttttcctccggtccttgatggatgtataataaatgaatgagtaaattatatgaaaatgcaagtatgatttttttaatatacagttacaacttcgacatccacagttgggtctgaccacttgttaagttgtacccagaacttaggtctttctcgctctccacgttccctatcaaggccatcttttcaataccaaacaaattagaaagaatacaatcagctaacttacactaacatactaacaaatgggacaacagtcttcaaggtctggaagaggagagcagagaactcatcattgcctgctcaagcccatctaccaggaggggaaactccagatactgtgggccacttggcacttaggaactcatggtactgatctgtatattgggcagatatagttttttggtgatagtcttaaaaatcatgtgtcacctgtcatgacacttgccagatgaaattctgattttatttcccaagagaatgcactgacaaattaataatctgacctttaaacgggtgatatttctccatgtcaatcaacaagaggccattctgttttgttgaccagataaaatactctttcactctctgaggggttagcgagagtgcatgcagatttctccaatgctttgcttttggttggaagcagaaacatttaaatttcaaggcaacacttttcctaattcctactgaactcaaaagctctagtggttcagtgatcccattggtaacaaatacttagagggccagagtccttctgggtcctatccttacgctcctgttctctcctcctctcaggccttttctgcaccatgcaaacccagcacctcttctcacaggctgggctaaaggcagaatgcaataccatgactgaggagcctgggaatgaggcaattcattaacagaacattccccaggaaacataattttctgatcataatctctttgttcctgacagttgcaaaattaaataccagagccaaaaaaaagtgaggcaccgttttaagggtatgttttcctaattcgatcttcaaaggaagcacaagcttagggttcgaaatcattatgatgtaatattatgccacataataatacatagatccaatcattttaccagataaccgtcaatataaagcactgacaggacatttgggacttcgggtcaacaggaaggtggtttttcaaactaaactatattatttatggctttgattgtcatttacttttacaacataagggtgatggtaattctgctcttctgccaataaatctaaaaattaattgaaaatgtagtcaaaatccttggcacactttagaaggaagatttttttaattaaaaaagccatattaatcattatataaatgagttatattagtcctgtaaaattaaatctatggtggaaaggaagtcagtgagtgatataatcggatttcagaacacatatcatataaaaagttatgtttctaaataaagtgagtgtgaaagaattcaggatatattatcagtcatctgagttactgccctaagacagcccttctcccaaaacagatatggtttctctgacaaagaagataagtgtgccttctcatatttttattattttcttaactgtcagacataactcatatgtagttaagttgctcagaaggttaaattcggaggaaaaattctacaagtggtttaaatgagccaaatcatttttggttgcgtcatgtttcctccgttgaaaaagtctcgatgacttaaaaaggattgctttgatacttagcttagtgttttacccaaaaagcatactgaccaaaaacaaacaaacaaaaaacccataacaaaacaaacatttaaagatatgtagaccagatcagttttctcctgatgaaagtcacatggaaccacacgcaggttaccttgctttcagcaggtccctttccttgggtgtgaattttatttgttacaataaccgacttggcctagttactcagccatccttcgttcactcttggtagtggacatggcaagatggtgggtaaaaacacgtaaacaagactgctctctcgtggaggtcactttcacatggaaagactggacacgtcaaaacacttcattaacatgatataaaaataatacaacatgtaaagtggtatcggcgcatctaagacaaagcgattcaatgttaaatccctctttgggaaataatttaagattgcagaaaatgtttctgagaaattccaatgtaaacgtccttaaaagtccctactttttagtatttggtattatacttatagattttgtgattttccagatttttcattaaaagttaatatgcataaaactcttgggatggtagcaagtacagagtgaaatctatataaattattattattatcaatatcttttggagtgaacaaattgaacattttttgaataatcttttgcgtagttgactgaatactagttaataggtttctattgttttcttgagttaaatcagaagcagatattttgattgactgtgtaaggtcttgcagcttctatggttttttttaacttgaaaaggtcttcccagactgatacctctttctgtcttgaactctctgttcaactatattctaaagccttaaaatgaagatcttcaattttataactctggatttaaacttttctttcttattcttttttattttacaaaagaaaattttaactctttaggttgattatatttcttgatgaatgtgactgtaccaagaggctttaaaaaaattgagattagaaatcagtttttcttatcttctgaattattcaccatatgatgtgttgcatttgagctttatctatgcttctggtaatatttctgtcttatataattgttaaagtataatgcttctcaccaggaagactatatatatatatatgtttaataatagcctttttaaattttcatgtgttttttcttctcctttgttttctgatttttaaaaaatcagaaaaatgtctgaattgtcactttatctgtagattcaaagagcactttctaatcatgtgttggcattagcacaacaccggggaagatctgattgctgtaagccgttcattcattcagcaaatactgactgaatatgcagtatgttgacctgtttgctgagggcctctctgttccggctgccattctaaagcgagtcaagttttccctgtaacttttattctgcagaagtaacctgtacctttttccattctcttgccattcaccactctcctgacctccctttgcgtaaactggtttaagcctggcgctctaggtccatccaacaacaccggtctattcacactgtagcagagcaaccaagcagttatacaattttcatcttaactactagtaatactatgctataaaaattttgaaacctagattttgagatattgagcaaactaaaatatgtagtatttactatagtgcaagaatacgtctgacgggttaaatgcacgcgttttggaaagtgctcaaacccttcaccagatgacacagttatagcacaacaacagctgaggttattgttatctaatctcctttccctcgttaactttagcacagagaactgaaataattgggtgtgaaggcatcttgataatctaccaaaaaggctcatttttaagcagccaagcgttgctctcttaaacttttgttgtttagtagcataaagtgtaggcaacctgtatgaagtataaatatctggtattaaaaagacccagtgaggcagaagtcgctgactcctctcaataggtggaagaggattctccatgcagccgaaggcttaatgaagcacatttccaccagccaggctgctgcctctgtggtgttacctcttcagaggactcagtgcctctgagaagctggctgtcctcagcgagaagtaagtacagggacttctgtttagaggagactagaatgaatatttatactaataaattttctccaacatagccaaaatctcatttgaatatgtttttctttctgtgcatttaaaacacttgccattcttcatggcatcccatgcttgtactcttagaggatcttcacgagtggcacagctcttggctagaatcctatttttttttttttttttttttttttttttttttttttttgagacggagtctcgctctgtcgcccaggctggagtgcagtggcgggatctcggctcactgcaagctcctcctcccgggttcacgccattctcctgcctcagcctcccgagtagctgggactacaggcgcccgccactacgcccggctaattttttgtattttttagtagagacggggtttcaccgttttagccgggatggtctcgatctcctgacctcgtgatccgcccgcctcggcctcccaaagtgctgggattacaggcgtgagccaccgcgcccggcctagaatcctgtttttgctatagtttgttggactccttgcggctaatccttgcagctatattagtctctgagggatgctgaattgaatagaacatcagaagatttggagcctgacgggtttatgttgcccctgtcctcaaattcaactattccagaaaaaatgtactaggacaaggaacctgaaaagaagaactatttctaacaatggattggatgaactctcccattcaaagcagaggatataattcattataagacttgtaatttactttaaccactgggaaaacatctcagagggaagagagaaaaactgaatttctgattaaatttaaaaaatcaaaaatttaataagtaggcaaccgtataaatgaacagaaaaaaacaaaatatcaccgaaactttcagataatgttctttgttaaaaataagtttccctaaattataatatgaatatataaagagaaattagaaaatataatgagaacattaccaggcctttttgttttctttcttttttattgtgtttttgtttttttgaggtgggaaaatctttgaaagtaagacccttgattggattcaggaaagtgaaagctttctgaatttttgctcaaataatgcttctctaaggtacagaatttaatgctgaatttatgtctacctcacctgtatagggaagaggaaaccactgcttttttggccaaaattcctacttggtaaactagtatatttccgttttgaagaccaaggtgcagtgaagtgtggtggagttccatatggatctgttatgctgcaaacaccaaagtaaaaacccgtctttgctggttccccgtcatttattcagcaaatatcatcttaattgaacttaagctgaaacgtgagttcttatttgccaatactcagaactcaacagttgcagaagtgtttccttttaactgcatgtccatgtcttgagtttttcagaaataatacagaaaaacatattttgaaaacatatttatctgtatttttccacgtgacagtggcagtttaggatttaacaggcatatccataattaaattgttagtttgaggaacttccagaaaattatctaatgcaatcatatatcacaagtcttctttataaaatacaagtgcaactcatttcattatgctatccatgtagttagacataactgagacctttaaaaatattataaatgacttaaaatagaaaatgttagaaacagtacaggcatattacaaaatcatggtttctgaaatctaattactatatgcaatttaaaataattaaacatgattagtctttaagatgaatagaaccaattccaactttagctattatttaattatagcatgctgtacattaaaatcagctggaagatagccaaaataagctttaaaggacagcatgataattaagaattgctatttatcttacttttattagaaaactcaatgctggaatgaatgcaataatgtcaagaaatatgaatttaaataatttcctaaatattttactttctaatcccaaatatcaggatattttaaacttcctcatcaattctactttatatacaaaaattcatacagtattaattagaacttttgctttcaacacagatatcttaaagacaaggaattatgtatttataacttcttaataaaactatgggtacattcttatttttgattgtggcagttttttcataaaaaggctactgaaatcaggcttatttaaaaaatactaataatgttatctaatatagaacagagggtaggaagtctctgtaaacaaacctatatctatatcaagagtgattctaagagaatattctctcccttacccaggtactcaagttgtagggtaacataactagtgtaacgtaactagtgatttccagtcaccttttaggtttacttaggaacattaaaagaaatgctgccattgtagacttcatttcaattatttaatctctttccagttcacgacctttactttcttctggtttcagcaagaaaaacaacttcataagtgtcttacattataatcggctactaatcatcatcaactcaacattagttttaaacagtctgattccataacaaatttgtaatagggatattttctatacattttataatagccatggatagaaaaatagtattatttatatactaaaacattcaagttgttttgtttaaaacatacattgtaaaattttccctcgggaaatttggatttattataggacagttgtagcttttatgaaattgggatcctgaagccatattttcaaatcagaaaaatgaaagcctcattgttgtttttcaaatgttttaagtttccttgataaaaggcagtattaggacttctatttctaggtcaagtctatatttacagtaactaataggaaaatattgaagtctgaggttaccagtacaatgtctgaatgcaaaattctggacactggacaaagtactttagaatcagaggccagcaaagctctggaaggctgtgaacagggacaaatgcaatatggttcagcagacagaaagtcagaagtaagattcagatgtagccaagcagggtgggggacagtgaggggggatgtctagctggacttgaagggcgtatgaaagcagctgtccttgcaggggagatttaaaggaaatgactcttcagggggcactgcatttgcaaaaaaaaaaaaaaaaaaaaaaaaaaatctgatatagtatgttttggaaattccaaaatatttgatattgccagcagaagagttggaaagtggcagaaaataagggtctaaaaatagccataagcgaaagtgcaaagtcttgaaggatagagattatgtctctgaacctggttctcaaaattgttgaattattaactatggagatgcgctgtacagaattgaacttaaaatggtcatctgtgtatagcatgtcatcttaaaaggttactaaaataggaaagaacttgcacaggtataaagtgtgtgccattcctcccgtgggctaagggtcttgtctcacttggtgccactatcaatgcaacaggcacagcagtcgggtgtgccctggatatttctacacctcattcttctaaaagctcccccaagaaaaattaataggaaatcaggtgcttgctgcaggtctttgcactgtgtcaattctaagaaatcctttggcagtgtaaagctttgaaggaaattaaattggagagagattttctctacctttcattcagctcatatagaatcccttacttagctgatatttttgctcatagaattggactcagaactaagtctgttcatttagctttcctttgaatgttaaacataatgaagtacaaggccgtcacctcaccattttatcccctacaacccgcataggcgtacacttatcaccaaacgtttgcacatgtttggctccactgagattcttagtctctatctttatattttgactattttgacatttagaacaaaagtttggaaaactattctcctactgctttagcattctcttatcttagggcttatgaacattgctacatctctgaaacaggcggttcctgcccatatctatcagtgaaaattatacttaaaattctgaagagactcatgtcatccagattttggaggaaaaaggtagcaaataaaaatatacttcttagaagtagatctcagttactacttattttaaatttcacagtagattccatcttttgtagataggggttttgttcaaagtttttgaccaaacatttttattaaatattttcaatagtattataagtgatctgacatttttggtaacaaaacaaccaaagaactgacttgagtaaagctgaaatgttgctgaaccagaatctaatccttactccgtcattttcttaccagggattttgatttgactgaccagtttcaatccacagtaacagctttgttcctaagagactataaatcaaggaaatactcactaccaggcaattcctcctgcaattcggggtctgtgctgttattatgaagcaactgacagcaaacatttgctgcaagtatgagcgcagatttggatgaggtgtgcggtgtttttggtttcactctttatctctgaaacctatctgcttgtgagaaaaattgtgcaagaaaagaagttttactgccacatacctcagctgtcctagaactcaatgcagaggcttcgcttcctttctttccttggattctgagccgggggagcacaatgggggtcttgtgctctgggccagcaaggcatgcagatactcggaaaggaggtgtgaacggcttccaatacctacactgtttgctttacaactaccccaactaaatcaaacaggacaccaagacactcagtccagggtaagcaagtacaaaatccactggctattatgacccacatagagaacagaattcttcaatttaagtgtgtacatagctgtgttaagagttaaataaatcatttacgaggcttaaaaagaaatgcttctcatgtagttctttttcatgtagttctctgaatacaagtcaaagtgcaggtcacgaaagaatccattgttcacaagcgagaaatgttgttggctgtgaggacggttcagaacaagccatcgtagtctgctcaaacagtaaatattggttttaaaaccccaaagcatatcggtcatgttttttatcttccaattgctagaaccaaaattcactgaaacaactctatgtctctgatactattttctagaaatgtgtgtgtatgcgtgtgtgtatgtgtctgtgtatgtttgtttggtaaatccaaatcacacaatcaacgtaaatctttcaggctaagttttgccccagttatttttatgctgtgctttcaaaaaggtcaaaaaagcttacctctgtcagtgtactgggacgctcaggaagccccttctccgcctcggcctcagcgtgcagacatatgccctgggagcccacaatctgttaacaggaagcaggtaaacccgagagcgtccgcctgcgttccagtccagtgcccgtcccagcacacacctgctttttcagacctgccgctcatatgccacagccacgcacaggaccagcgttagcagagtgcaacaccctccgtttggatccctcgttttcagggtaagcagctagggagctgctgagataatattgcagggaaagcttgccttcccaagacaaaaacctttgctgctgcctgatagcagatatgcagcattatcactctgcattccacattctccaatcagctaattggaacggcagtcaacagcctgtccaaaaggcagcttgcaggcctgcgtggctgtgatcattgtatactaacatgcccattgcttctctcttccctgaagagatgtataaaagaggcttcttccagggcgaagctcagcagaatatgccacactgttttccataagtaaaatggctggtcctctcagctctgctgcagacagctcattgggttccactggcttttcgtagccatagcaacaaccaacagacagacttagcaagcatggctgatcatgtgcagcacactcacacagcttgttaatttcttttcatcaaactcatcatttttttgaggagggtagcttctgttatctttctacacatttcaccgatagtgcaagtgctccgatttttctgctctcctgaagaactcttttttatatgagccggggctatgtatgaaatcgaggaagtgaagccctattagtggctatccaggttaataacatgcaaatcacttaagagaccctaactggaagcattgtcaaaacaagccccaccttccagtcatagaatgagtgcagagagctgcaaacgggagagttacactttttgtttttaaatgataatcttagagccacttaattgaaacaaaaccctgtgaattgctatatagggtcagaataataactaaatcaggtagactattttaataagatctttaaatatccatttacttatggctcaacttatctgattactttaagatgctttttatgcaatttaaaatagaatttttaaaaaatcctattgcttctacggcagaaaatgattctttaactcaatcttatttgtaaattaaaaattctttttaaaaaatccgcacctaattaaaaattctttgactttaaacattaccttcaaggcaagaatagttttacttcctcagtaaaatggatcacattccacccgtccataacatttcacctcctctgggaatctaccatgattaatgccatgaacaacgtaaatcttctgcagaacccccaggcttttcttctttttcaggactctatcaccagtcatattctatctgatatatttccaaggcactgtcccatttatttttgtttctagcaatctgtttcaaatagttatgttaacactttggacttgtaaatatagatgttctatttgctaagtagtcattgatttaggattccgtcagtattgcgtttccctacccatgttaacactcctgccttcagtattaattcccaaattttgactgcataggaatcctgtggatgtagatttggggatgcccgctccccttcctccccaaccggattcacattaggtaggtctgagccacccagggtcagcgtatccatggaggacaagtgggtggcgctttcctgcttgggagagtcctcaccgcttcagatcgcctccagccagcctaccttttctcactgaagttcccttccctgaagttattttgcatttgctgttgctgagcgtgcccctgccttcgccctcagcctcccattctactattcactgcccacgtttcagaatcctgcattacacaccatttccttgccctgcagatgctgctactattaaaaaccttctcaatctgactgctcctcgccccagcacctttaacctccatcccaatctgcctcctcttttatcttccaacacctggcccaaatggaccacctcactcatgactctcccaggtggggtctgagcgacctcttctgcgactcccctgtaccggggtccacctctgctattacaggccttgtcacgccctgggacttcttagcagttctccttttatgtctgactcccagactgttctatcaactctctggaagccaatctggtccatgtcttctttgccctccatgcttggaatattctaatttctcaatgcctctaaatgaggacctacgacactgtatgaatagggactgatgactggctggtgtgaaatctgtgttttaatttacttttcaacatcacacatttgttgactcatcacttcagaagaacttcagtgattttgacaaaatgctggcatgttacaaaaggatatcaagaaaactctaggtgcacttgatgttttagggtggcttttcttttcattgtatctctgaaaatgtctttataccctcacacttgattgattggttggcaaggcataagaatctctggccgtggctcacacctttattcccagcactttgggaggctgaggcaggtggatcacttgagcccaggatttgagaccagtctaggcaacagactgcatctctacaaaaaaaaaaaaaatcaaacaaacaaacaattagccaggcatggtggtgcacgcctgtggtcccagctactcgggaggctgaggaaggaggaatgtttgagcctgggaggtcgaggctgcagtgagctgtgatcacatgactgcattccagcttggcaacagagggagactctgtctctgtttttagtagcaaaacaaacaaacaaacaaacaaacaaatatctgaagtcattttcctttggaatttcaaaggccttcatccttcttcttgtatctcctcctcccctatacctccaattcctgctcctccaaagagaactggaagtcccccagtttgcactgaaccggaactgggaagctggcaggaactgagatgaatccctttcccctctttgccccgtggcacgtctcccggcatctctactggccttcacacatcactctgctgccagtctgttcttccaaggctcttggctccttcgcctgctcgaagcccctcccttgtaacttggtgcactgaggcccattggcattgctctgacctcaggccctgccctagcccaggtccctgacgtttattctccttccaaacgtgtttgttttaaaatgtgctagatacagatttccaagagacaaatctgatttttccagcccatctttctgagtcaagtgagataccacctatgtggccagcagctttatacatgggctgccctgtgccttggtccaatcagctatgacaaggacacttggcattatctagttttaaaattttgctaatataataggtgcagagtaatggcccattattgtttgaatgtgtgtttctctaattactgacaaattgaacatcttttcattgttgatggttttcagggttccctcttctgtaaattttctgttcatagcttttgcctgttttctctattgagattgttgtcttagtgtggaattttaaacaacgtggtcataaaggtattttttatatatatttaaacattataattaaatttgttatattattaaaggttattaagatatccactaacatataaagggaaccctataattcacactgctagttgttttggtttttattatgaaatgaaaatacagaatgtgtgtgaaaatctccattcagaaattatgttcagtatgaaagcgtagaataccacaccataatatgattttctaagacaaatatttgtttagaaggattttcaaacaaatatattatcatcaaagaatacatatacacacacatatatatgctctaatagtatacgcacacacatatatatggagagagagagagagctatctatctatctagcttctattttaagttataccgtatgcacacctacacatcaatcaatctacctatctatcatctgtgtatcatctatggaaggcaaacacaaatgtgcaaaatgctaacacctgatgaatcttaaatgagaatattttcagtttattttactattctttgcacttttctataagtttgatttgttttcaagatacaaagttttaaaaaatgaaataaaatgagaataaaaatagtgtttagaatagacacagagttaaggttaagattagttgatgaagacataactatttatcagagttgaaactaaagaagttaataagttatggagtaactaaagtgattactaccattactgttactctgaggaggctactctggtagagagtattggaaacattttgcactttcttgaaacaagtttgctatttccctacatttactgcttccctgtattctgatcttaaaccatttatcctctggttcgtattttgaaatccttattagtctgtttccttaattcaacaaaatcatcactgcttgaagcaataggttcttctctagtcacatcttctgctgcagactccacagctgggacccaccaaaggatctggtccctggcacaacaaagaaacacgtcatatgacttaacttagagactggaattgaagcatggtttatgaggtagcaaagacttttgtaaagcttagattgaattttctaattcctaaaacaaataaaatagaatatcccaaaggttattccaaaaccttgcatatttagttactctcacaatgacgtgaacaatgtcaaaataggacattgatgggaaatgtgacaactgacttaggaggaggattgaagtatctcagtcaaacaaattggatttatttctatgattccaaccccaagaaatatatgctggaaagcagactgacccacaggctactaatcaaatgcgttcatatcccctgaagaagtatgaccctgatcagtatccagaatgacttttataaatcagaggtgcccaaaaccaaaacaaacccagcagagttgagggtttttggaaattcacttatcaaatgaatttaaaatgagaaaatgattatagaagaacaaaaccttgccagagagcaaatgataagaacgtaaacatcagcaataaaaaaccgttcaacaaactggagagaaagccaaacctattaacacaaaaacactgtgtgtagcccattagttgttcctagaaccccctagaaattctgtatactctctaggttaagaggaataaggaaaatgtggcaagaggtacaggaagaagtttcagctagtcctaagtctggagagcccggtctttactggctaataataacaacattgttttaaatatttcaggtttatcaagctttgggtttgcaaatgactatgattgcagcagcttacaggaactactttatcgtaaaatgtgtgttaatatgtgtcagtaccaggtggggaaaaaataatggtgttatccaataataacaaaagaaaaaaaaaaccacccacaattaaccccctcccacagccctgttaaccagtcccaaacatataaatacatcttgctgtagctagagaaaagtactcctggcttttattaaacctgcagtggggagagattctgcaagcaatacagaaaaggctgcacttgctcccaaggaatttgactgtttatacttcataatgataagcttaaaaagcgacctggaaagagagggctggctgctttcatgctcctgtgaggggccacactttgttcttggagaggcactctgaccacattaatagagtgtagctcccatgacctttcccacttagcattgtgtcctgtggcagcagtggcccccaggtacttccgggcaacgtgccaccctacccagtgcagaaaaagcactgggctctgccgtcacggcattgttgaattagtaacgaaacgcaccaggctcagcaaacaaaacctggcaagaaggattttaaaacaaatgcttctggtttcacctgagccactgaaacaaattagaaggtgctgggtgaaactgggcagcttccgtaaactctgaagaagatcatgctaaagccctcagctgccaaatgtgcaaatctcaaaagaagtgaaaattagagggtcaccttgtgtcttctagaagtgcttctgaaatacatgttcagtaagattcattggtcaagataataagatgggcccaagtgatgtattaatacaatcaggtacacgttttaggatccaacggtccaacaacaagtggaaaatactgttgaaaaataaaaatccccaatccgcactggaaatagtagatgttcagttaaaggcctgacagtgacagcacgtgcaggtaggaaaaataaactatgcgtgcttgcagaatattggatgggagctataacccagaatggtaattattttactaagcctacccaggtcagaattcagtgcctatgtgtttgtttgtttgtttgtttttgagatggagtctcgctctgtcgtccaggctggagtgcaatggcacaatcttggctcactgcaatctccgcctcctgggttcaagcgattctcctgcctcagcctcccgagtagctgggattacaggtgtccgccaccacaccaggctaattttttgtatttttagtagaaacggagtttcaccatgttagccaggatggtctccatctcctgaccttgtgatccacctgccttgccctcccaaagtgctgggattacaggcatgagccaccgtgcccagcagcctatatttttaaaagtcagactctggcatcctaattgccagatcattgccttgaactgagaacattcttctggacatttcctgcatcaaaggaagactatttgaaacattccttgtgagaggtcaggagatcgagaccatcctggctaacacggtgaaaccctatctctactaaaaatacaaaaaattagctgggcctggtggtgggcgcctgtagtcccagctacttgggaggctgaggcaggagaatggcatgaacccaggaggcggaggttgcagtgagccgagatcgtgccactgcactccagcctgggtgacagagcgagactctgtctcaaaaaaaaaaaagaaaagaaacattccttgtgaggtttaaagtagcatgacaaatcattccacaaccaactttcctataggcataaaggtagattttaaaaaatttatctgagagctgatacctgacctgcatcttgaaggacccattattctcttggcatgtggactctttcctatatctttccttcattaaagacatggtttgcttccaacaattggaagcaaactcaagttgtgtttcaatttttggtaacacatgagaaagtcttatcacaggatcaggattggctgcataggagagaaagctcaaataacagggcttacaagagacagagctatatttttctctcacttgaaggattgagaaataaggagttctaggctagtagaaaattggcctcatgattattaggactctagctcctaccctctgttctgtcatcttttgaaactggtttctatcctcaagaatcctcgtggtccagaatggctacttgtgctccagccatcaggtccatgttccaggcaagaagaggagagggagagccaaggggcacattttccgcttgagttggcctctttgaaggagcttttccccacctcccacccagcacttctgctgatatctcattgcatcctgagtgataagtaagtctcaaaaacgtggtcttttcagccggacgccttttggtcccaggtaaaccagtgttctactactgagaaacaaattgataatagggagtggatagacaacaagctgcctctgccagctcatgtcagcctgggtacaaagaaagtactatctcatttctggacattgtcagtgagcctttattcctggctggtcacctgtcagtgcagggatcacccaggctgactcggtgggttgcggaagcacccttccttcattcctgcctgggggtgtccttgcctatccagccactgtgcttaactcctcagcacagactcaaagcattgccatctctccttatactggtttcatatcaatatctcaaagtatacttgttcattcactgtggaacaaataaataaatggtgtggattcaaatattctgcaatttgttagctgtgtgatatgcaaattgcctaacctctttgtgcttctgtttcctcataagaaaggatgataatattatctaattctgagggcggttgtggcaattaaatccattaattagcataaaagggtattaggtattatcttgaattttgtatctttgatttatggtgcggcactgggtgggcacggacctccgggaccttccaataccgtgggaaacatcagctggacgtggaccagagcgtcaaaaagcaacacaaatgcatgtgttcatcaaaagaatggtccagacggtgagggccgtgggcttcagcaaaggagaaacaggcactagtgtcatcagtgggaacttatcgcaggctccctgcaacctcacctggacagcgcggcgctgtgtgaacagccagcaggaggccttttcgcttctgcctcctgctttccttcccggctgatgtcctcccctcccctttaatttaaattggcaccagtttcctattctctcggcagccctagttctttccctcatttaaccttttcatagaatctagtggggactttatcgaccagatgccaaggggctgccagggcagggctggccttcagaggaggggcatggtgtgcccaagtcctgcagttggggaaggagtagggagctgagaccacagagggacagggacagaggctagggagcagcgtgcgcggacaccttgcctgcggggaaggcctacggaggccttgcagacagcgtctcagccgacacacagggccctttaagaaaagaggcaccgtgttctttaagagttctgtagcagagtcctggcagtcccgggacttcacacgctgcacatttacttgtgcttttatttacttaatctctgtctgtcccgcgagattataaactgcaggacggcagagatcatttctgttttgttttgaccctgcttccagggctcagtatcgtacctgggctgtggaggatacagaaatgccgaatgaacaaatgaacggatgactgggccacatgggtcccaggtgaatgaattctatctgccccttaaggccatcccttgattcaatccgacaaacatttcttcaacctgaactaacccaagaagatccgcatcaagggtcagattactaaagcactgcccaccttctgggtgggtgaacgtgagggaacaaatagtgatgttccagtgtgatttgcccacgcccggggggcaaggggagcagagggaacaaatgaaccgtcccgcgcctcaccaaggggccacacgcgagctaagtggctgaagaggagttcgcctgcctgggaagccagggacaggacttccaggtggaggaagtggcagctgtgactgagaggtggagtggcacagaagcctgtgttgtggcaggaagcagaggcgaggtggacagggtggaagggtcactgtttgtcaaacaccttgtttttcgtggtaagaactttgggccttatcttcctggaaataacaagccaccattgagttgtttttatgtttgtttctttttttgagatggagtctcgctctgtctcctaggctgcagtgcagtggctccatctcagctcactgccacctccacctcctgggttcaagggattctcctgcctcagcctcccgagtagctgggattacaggtgcccgccaccacacccagctaatttttgtatttttagtagagacggggtttcgccatgttgaccaggctggtctcgaactcctgacctcaggtgatctgcccgcctcagcctcccaaagtgttgggattacaagcgtgcaccaccacactcagccccaccatagagtcataaaaagaacacagatgtgatcattcttgcattttagaataggagctctaggacccatttacctgggaaatacattttaatggagtcattcacatggtttgatgttttggtcgcttttattagtcgtcattattacgaaacatgtctcgaacaccttcttctgtgcaaggtattcatattagttgcccgaggagatatcaacaaaatgaaggacccataaattataagacataccactattttatgttccaccaaaaaggaaaaaaactgctgccaatgaaattgtaacacgatgttattttttgagtcttattattatttgttggaagagatgtttcaaatgtattgagattaaatttcatcctctatcactctgtgtatagaaaaaagaaagaagtgaaattagttggctacaatattcttaaaattcttcacctgcagtattcagctcttctgaatgacattactatttagggtttgacagtcatcctttatctagtgtttccccagttgggtgtgcatcagcattaccaggaaaagtggaggaaatggaggcccgggccacatgccgttccaacaggcctggagctctgtattccttgttggtaaccaaaagatcctgagacccccaaagaggaggaaacgctgcccagcacatcaggagagatggcacagcagcgcttctgaagtgagtgcccgcttctgttttcagtattttttgtattcggtgagttttcacagacatgcatatgacaaggttgacacaactgccatgtgcctggcagagacattgtttctgggatattagaaaagacatacgatgggaactttacaaaatatgcaagaagtatatgaatgataataacttgacttctatgaacaggaactaagtagattgtggcacagccacgccatgggagatgctcagtgttgaaaagtcattatgtagaatgatattttccacagggtgttccaggacaggctattctacaggggcaccacaggcaaaacaaggttgggagatcctgcaaaccatgccccttgcctagagtttcagagtgcgctcagcattctgagagttctgagaacgccgggagtataaagattttacattttaagctagaattttccaattatggcattaaagaaagaaaaggaaaataaaaactcgagaccccaattcacgatgccaaaggaaaaaattaagctgaaagctgagtcatgcaggaagctgcctttcctttttgttcctaagcagaagctacagatagaaggtttgatatctccacaggtagctactctgtgtttgccttatcttatgtaaagtgccgttttacggagtgtcagaggaatacgtactgactcttcccctgcccgctcctttcctcttgcaacaagtggattcagtgatgtgaccataccttccttctttcccctccggcctccttttcccctttatgtaccgaagtcctcaaaatcatctttggagaaaggcatgtctctcaggcatgtccttaaccttggcaaaataagcttctaaattgattgagacctgtctcagatgctttttggtttacaatgttcacattatattttaaataaacagcaacaacaataagcccataaaaatgtatggtggcaccattccatttttgtaagtaaaattttggatatatagtcataggaaaaagacaggaggtacactcaacaataacaatgtttaataacgagggattgagttatgtataaattttcttttgtttatttgtatattctttagtaaattgacacattttctgaaagaaaatggttattaaaaatagcaatagtaaactgactttatgaaaagtcagagaaagatttgagttttcctgatatgttctgtggaggaagctttgatgaatattaaaaaaaattcagtgagaagatggagacttgttttatgaaacttctcaatttccacgagacaggaaaaaaagtgttattagtcacacatcacagtcagaggaaagaagaacagaataaattgggcatcatgtgtaatttttctgtggtctttttcaaggccgtgcatgcatgaaatagaacattttaaatcaacaagtcaggctggtttgtctgcggttcgataaaaaggccaagcagagaagcccgctgattggatctcagaaattcgtgaagctactaagggaagtcaccttaaagatagcagctgataccgtatcttagggtaggaatacctcttacaagttaggtcatcttgggcagcctacttaactctcagggtcctcatttttttgtatcaaaatggccatggttactgcatttgctccctggaggtgtcgtagcaaagtaccccaaaccgggtggcttcaaacaacagacatttttctcacagtactggaggccagaagtcagcagatgaggtgtgggcagccccatcctctctctgaaggctccagggaggatctttccttgcctctcgctactcctggctgctgccagcaatcttggtgtttcctgacctggcttgtggcagtgtaaccccaatctctgcctccatctgcacacacatcttccctgtgtgtgtctgtgtacagatttctcttttcttataaggacaggagtcattgaatgagggcccaccttaatccctatgaccccatcttgccttgttacatctgcaatgaccctatttccaaataaagtcgcattcacaagtcctggggttaggacttcaaagtatcttttgaggggacacaattcaacccataacagttatggtgttacagctataatcctttctgggaaaaaagctgttgttccctatgcagttgggtctgtgaaaaaccaactcagggacaactcaactgaactcaattcatacatcgaggaattcccaggatgctggtggaaaagatcaattaaactgcatctctggatgcttttttttttctttttactgaattggcagaaagactcctctgctagatttagagtgaatctaccattataaaattgaatcaacaacaaaaagggataggtgtgatatgttgaaaagattctaccaaatctcctctagactgattgctctttttagaagaatcttccagggtaacatctcccaacccacactctcatgccaaagtgcatcctggccccacacgggtggcaggcgggctgatccctacacatggtttctgagattgatcagggggcttccaggttctcttcagccatcagtttctgagaggaacacctgggatttcattgcatctccaaatacaggcactgcttcttaattcaggctctccgagattctgcaccctcccctgggtataggtcaggtcctagtagcagcttcagaccaccagtaatctaaagcagttactgcagctttcaaaggcctaaaatctcagagaattattaggcacatggggaatatctttatttgttcattttgttctgttttttgtttttttttttactgtactgagtatcatttataatttcaaaacagtgcaataacagtcaatgtaatttattagcagattaccatgtgccaggcactagctacaagttttagaaatattaaatctcttccttatagaaaacctgccaaacaggaattatttttatttgacaggtgagaaaataggcttaaaaaatgtatgacttccaaggttaaagaatcacctgattttaatactatgcagaatttcttacttcagcactgttttaatgaattgtctgtaaatgtagaaactcctgtttgttttatttggatcagattcctgaaagtcgatcagaaggaaatggtgatgttcccagcatttctgttatttttctttttgccattgatctaggataaatcattttgatcacttttgttgcagtttctgtatctcagaatactggtattatattttttgttgttctcaggtcctgtgcacaggcctgtgggaggggagaaaacattatcatgatctagaggctagattactttattagcagcaataccacttgaacatctaactacagagtcactcctgaggttaatgaaataatttttgtttccagatgttctttacattgggcctaagtccactgtgaagaaaagaagaatggttttgattttctcggttgcgatgacctagctggctcaagacttcctcactcggtggctatagactatcttcacctgaaactcctacaaagtgaaacatcccaggtcactccaggaagtctttctgcggttaaacaagctggcctgaaagcatttaaagtccatggcttaccaagccaaacaagaactccattcaagcaaaatctaagtggagaagcatcgtttcagtcagccacattttaatcagcgacacctcatgaaatgtggactcagacaaaatattttaaaattcattttgccacatcaatgcatttatatcataagcaatatccctcagaggtcatgtgctctgcagaagtagggggattttctccacagtttttcttcatattgaggacttggtggaaatgttttcactcagagtggcccctcaggcaccctcacctagctgaggtgcctatgctcatcgaccactactacctgttcttcaagctaccctggtctacgatcaccacaaatccaggacctgagcagagcctatcagcatgtcatggaaatctttctggagttttcttataaatcttttcttttttctttgccctgtgcattattcataaacaagtcatcctagtctctaaacagaacaagttggtcctgtgagctactgaggatatgcgaatgtactgcaagacacacttcacaatgtgtgaaattatgattaccttgcaaaatcaggaccatcaatatatactgttttttctcttttttcacctaattcactgggtcagtaggaaaaaaatggaaggataagaggccaatgaaatcacactaatttattcaacaaatgtttttcctgacttctgtgatgtatagggcactgtagtcaggtgaaataacagtaaaatgggaatcagaagacaggatttactataaaattgatccctaattatgtgaccatgagcaaattcctgactttatgtccctcggttcttttatttgtagattgggagtgatttaagcatctgcccactcacaaactattatgaggatcaaatgaatctttttacttgtgagataaaggacaatgcaagtgacatgcagtggttttccttctccactgctaccactgtaccccacccctgactacgtcatcatcatcatcaccatcaccaccatcatcaccaccatcaccatcatcatcatcaccatcatcatcaccatcatcaccatcatcatcaccatcatcgccatcatcatcaccatcatcatcatcatcaccattgccatcatcatcatcaccatcatcaccatcatcagaatcaccatcatcatcatcatcaccatcatcaccatcatcaccatcatcatcatcaccatcaccaccatcatcatcaccatcatcaccatcatcaccatcatcatcaccatcatcatcatcaccatcatcaccatcatcaccatcatcatcatcatcatcatcatcatcatcatcatcatcatcatcatcatcatcatcatcatcatcatcatcatcatcatcatcatcatcatcatcaccatcatcatcatcaccatcatcatcatcatcatcatcatcatcatcatcatcatcatcatcatcatcatcatcatcatcatcatcatcatcatcatcatcatcatcatcatcatcatcatcatcatcatcatcatcatcatcatcatcatcatcatcatcatcatcatcatcatcatcatcatcaccatcaccatcatcatcatcatcatcatcatcatcatcattgtcatcatcatcatcatcatcaccaccatcatcatcaccaccatcatcatcatcaccatcatcatcaccatcaccatcatcaccatcatcatcaccatcatcaccatcatcaccatcatcatcaccatcaccatcatcatcgtcaccatcatcgtcatcatcaccatcatcaccgtcaccatcatcatcatcatcgtcaccatcatcagcgtcaccatcatcatcatcgtcaccatcatcagcgtcaccatcatcatcataccatcatcatcatcatcaccatcatcaccatcatcatcatcatcatcgtcaccatcatcatcatctcatcaccatcatcatcatcatcaccatcatcatcatcgtcaccatcatcatcatctcatcaccatcatcaccatcatcatcctctgcattaggtttgttctctaaaaacacggtaaggaggggatttactgaaggggctttggggatgtgtccttagttatcatatctgtaagggagcaggagaggaaaaattggacaaagggagaaagtaaactttgataaatcttcagcagaggccacaggatgctatggtgctgagataacaccttctagttgccccaaaggaagacaaggagcctggaccttgggagccctgcatccacccactgcctgcaggctgcccacactaggagacgcagaaccagaggaggccattcttggagacagactcacttgtgagccctcagcaatgcacactctgggagctgggtgagtggacaccttagttctgaaagggagagatgagggattgtagcatccactaaaatcatcattatcatcatcatcattatcatgggcttgaaatggccttcaagaaatccttgaaggctcctggtcatttcgtttctataatacaacaaagaaagaaaagacagagtttccctgacaggtagcacaaaattaaaaatattagagcttaacctcagggaaggcagggaaccatggctcgcccaccgatcacagcaacacgagatcctaaatgtcccaagtggcagacactgtacatcaattccatatcaaacatccctcctccccacatcaattgcccctctactgccattccttttattgaatgatagattcccagggtggaaaagggctttgcaggtcaggcgattcaagtcactatccagccacactccaagatgggccatcccctgtggtggaggcaactacagtttcaagcatcctgttcttttccagagacttctccaagtgtggctggaatctgccttctcacagcttttaccattattggtcccattgctatgttatgggacaacacagatcagatttaatccatcctccatatgtgacacatacatattttggaactgcgctttttttgaaatgtgctcagtttccaaaacttgttccttttcaaagccaaaacctggcctcaatccttggaatatcttcttttcctcttcaattgcgaagattgctccaagttttttctaatccatgtaaaacaggatggggcaatcatcatactcttgctgttgggcccctctatacatgtggtctaatattaaaatactggactctcagctccatgggtaaacggtgtgatgtggttggcaaatcaagctctgtttttaagccatatcttccctatccttgtactaatgcagctggcttttttgaacagtagcatagtatctatgagatctgtgtgaaatgcagattccagctattgagatcttggtgtatactaatcttttttcaggattttttttcagtaccattaatgtgattacatacacacaaagtgaacagaaatattggccagaacaatagaaagtagaaaagagagaaagaatgagacagagagagaaaagctctgttattcccatccccatccccgttcccactagacacacagacacacaaaccaagagatgacattaaaggaataaatgaggcagagtgagcatctctccagaaggtagaagaatgagttttcttttaagttttgctcttaatttctggcacatagtcattatttattaaatgggaacacctactcggtacttacacatcaagctaaaacatccatgaaaaattatttcataatgtcacaatatattttttcataaattcttaattccagccatctgctctatacaacccatggttgctaatttctctacccaacttctttagtgctaccaaaaatgcatggctcaaaataaataattggatttttcagatttaaatcttcagctcaaatgactttactgaattaggagaaagaagagtatgggaaggatacctaacactcctgcattctctatatattaattaaattaaaaatttaaatttccactataattttcccaagagttccaggccccaggtatgatatagtgttaagaggcacagttgtaatcgcatgccatttgattatacatttgtactggtgatttttccaagtcaaacggtgacttcttcacatttttttctttgatttccctgattactattattaacctagatgtagcacattgaatggtgcttaggaaaatagtgagaaaatgcacattctggttggccctctagatgctctcaaatcatagtttggagaatgagccactaagctattggaattttcccaatgaatggatttgcaagatgaccatatagaggtctgaaacccagcacacataggtgctgtgaggtgggtcagcacatttttgccacctagctctttgaatcacccactatctgattttgagtctgcaaatagaaaatggttatggaaggaagcagctgaacaaatatcatcataaacgctgaagaagtaggagcatatcttttgtgtgttggaagaggcccccttttgatctctgaagtgcaaccaaattaagaaagggagtggcttcttcggggaaagtaaaagctcatggccaaaggatcaagaacattttctcaggatagagacttgctagttccattgcttcttttttcaagtgtaacccaaatgtcttgggttggtgctgtttgttgaagtaacatggttaattatttacctttctcaccatttggctaagattcttttcttatcaaattgccctgtctgaacccaaaacaaacaccctcctgagggcggttagccatcaccttaagctgggtttgtgtgagggtggctggacatttttctactatttttctcacggcctctgttgtttccagtagccattctgctagaaaggcccagagctaacttgtgctactatatgggtacttagggtttgctgtgacttggttcttttttatttttttagacctgctctttataactcttccttatttgggcgctattctaattcctccattcaacacggtgtttcagatttcactagagaaagtagccttttatcttctcaaggtttttctgccatttgaacttttgatcgtacacttgatcgtacactctaaaatggacccaacatggtcatctagaactgggatgatttagtcattaaaaataattagacagcaaaagggatattttgggctcttctcttctttcctccaagactcctacaggagcagattgctctggccaaatgtggcagaagaagagcgggtaggtggggtggcttcaatccacagaggctctgttgctgcagcaactttcagtctaaattccatgcccagacgaggcagctattcttagccttgactttggaaatagttttctcccttcttcaagtacatcactcttgaccttttatctttactttaaaggtcttgtgcagctgaatcctttatttgtttcctcaaatcatttttaggaacaaggaagatgttagaataggaaaggaataacaaatggatagggccctgaggggttaaatcacctggccagatcacacattgagtaagcagcacctgctctccttcagtgagtccggcattccatgaagggttactaagtttttattatgccgcaggtatgtggacgggtgttggccatggagtggtaaccaagacagagtcctttccctcagggagcttacagtggagactgaaggacagttctcttgactcctaaagttctattctttccactacactctgagatgttaccagtgctttaaaaaatacatttcctatttttccaaataggactgaactgaggcaaaactgtgaagtcaacaagacctcaatgctgtcatctctaaagtggaactaatactagcaccttattaaaatggtgaaagattaaatgaagtaactccttcaaagggcttagcatagtgtctggcacatactaactgttcaataaatgttaaatagtattaccagtattgtgttctctggttttaatatgatcaatccttttattgaagagaagcaatttcaatatatttgaaacttacgaatattagttctttgaatattaacacttggtaaggcagcagctttcagtctttgcacttatgccatgatagatggtttccctaaattaagctgaatcatgttataggtagacattcccttgtctggaatcttttctaggcactagttaagatttaaaatcatctaactttatgtaaaaaccccatctgatgctgttacatatctataaaaaagattgtattattttcttagattttaagattctacctttgcttaaaagccttagagtattaaatagccttaaatcaaaaatttaccctgaccaactataataagattatgtttacttactttacttctatctatcttggctggttaaaaataaactccacattttgacttagaagtcaatgattttgatttgtgtcaaatgagagtatgggagaatttggtcaccatggacgtggtttggtcacaatttgttttggttattataggttaaagcagaatccagtgatagctgatgaaacagaattattccttttcttaatttcagtttcttatatcttaaagttactctcatcccaagcttaaaattggtctaggatgtgcacagttgtaacttttttctgaagatttatttaaaagcacatttggttaccagcagtctatgaaaccttccttgtaataattcaatttgctcaaagttctcctgtggaaaaaagtgtatatgtatcttccccataaaggactttgagagaacagtaacctactttcacagcataggttggagaccgtttctgaacaagataaaactatcattcatgattagtccgaattcaggggtaatgctgaggtctaatattttttgaaacttatgtttacatccttgataaaattcttttcttctagtgatggcagaaacctaaagcagttttgatattctaaggtctttcctatctagctgttacagagtattaaaagcactactgtacatagttggaacatttttgttatcacattttcttcatatgtggtcttaaaatggctaattccaaagaacaaaagataagttatccatggaaaatgaagtcatgattttatctgtaccaccccatctgactataactaccatgcacattgtgtccaagtaatgtgaacatgtctggttggcacagctacaatagcagggctgataagtaactgatcagcttatccacagcattcctttcatgggaggtcactgtcccctttgtttctaaaagtccagcaaagcttaagcattccagaacctggtaattcaaattaattacatggtatcatgtacatggctcctgggattatcaccttgtaatactgtggcttctatgcttttaagtttgcctaattaaatcctttcaaatgaaaccagttaagcaattagtgctactacactatgtaattaatatatgccttaaacacactttttaaatggaatggtttgaaaaagaaatactttggataatagattactacaatacacaaaatacaaaaggattatcagtttttaaaattacataactatgggattcatcatatttctccatatgaaaaatgggaattatagtatcaaattcatagggttttataaggatttacacaggacatttaattcaattaaatttaatgtttagttttcaattaatatttcatattcattctcaactaatctttatttcagttaatacaaaaatgaaaatgtaataaaatgcaacactacaatcatagtggaaataattcgtttcatatattgcattcaaaagcacttgatgtttttgcgtcatataaatagtgtctatcttcctcattggactgacagctccaggagtctgattcctggaacataacatatgctccacaaagagttctagaattaaccaatgggcagtatgaacataaattatgacattggaaatgccaattaatagatatccagatgataaaataatgtttaaacagccttcaaatgtatgcttcataagtaaacacaaagtataaaatatatacacctgtattagtcaattctcgtgctgctgtagagaggtttaattggcttgtggttccacaggctgtacaggaagcatgatgctggcatctgcttctggggaggattcagacaacctacactcatggtggaaggcaaaggatcttgttaaaccatagaatccgcccccgtgagccaattacctcccaccaggctccacctccaacattgaggattacaattcaagatgagatttgggctgggacagatccaaaccatatgaacacttaggacacattaattagataagacacatactttatggtgtattgttagcatgtacacgtttctatcatgtgcttaagagcaaaaaaaaatataccctacctactcttgaaaagtttacattcatgtagagaagaaaacaatagttaaattgttctcaaatgaggcagaatgtaatcagtgctccacgtatacccttctaccagccgtatagaggagcaactagatcatgaaatgagaactactcttcttgtttccaaaatagtgaatgtaaatatttctatttaaaataattaattcctaggttgggccttatacattttaaaactcaaaagtgatttttaattaatattatagaatatcagtatacatttgatttgatttgtacataataaaaaataatcacgttttgctagcccctacactattgtttttcaaagcatattccaaagatgtttataagtcataaaatgcacctaacatgcaaagttataaaataaccaaaaagcgtttctgatatggcttggatctgtgtgttgccacccaaatctcatgttgaattgtaatcccccgtgttagaggtgggactggtgggaggtgactggatcaccagaggtggacttccccttgctgttctcgtgaaagtgagtgagttccctggagatctggttatttaaaagtgtgcggcagctccccccaatctctccctaagtcttgctcctgcctgtaagatacctgctctccctttgccttccgccatgagtaaaagcttcctgaagcctccgcagaagcagattcttccacacttcctgtacagcctgtggaactgtgagccaattaaacctcttttcttgataaattacccatcctcaggtatttctttatagcaatgcaagaatgaactaatacagtctccaaaaacaatttttaatcattttatgagaaaggaagtaaaccatagaatttaaaatttaaaatgttgcttaatcacagaaactaaattaaagaacatttcaattctaacggtgttcaaaattttattgtcttgtttagtggaagatggaatgaaaccatattatctcacattcaggtgaacttatgacattttttcccctgaggaatctagattacaatggaaaaataatttgtcaacagaacattagaatgtgcttacgtaagtaaaaattccagtgacaattcatttgcgcactgttcaaaaaaggtgatcacgatggaaagattttaaattttgttgtttgtatttttgccaattttgaaaggatttttttttttttttttttttgcaccagcagtgttcagctattggggactaagtattaggaaacctttagccagtttatctcctctcagcaaccaacatgatgggactggagccaacactcatagttttgaaaacctcccttgaaggtgggagacttactttcccaagatgaggagtgtctgaggaggctcaacccggcctgtttccctgaagaagtcccataaaccgtctattacagatgtgaaggagaatatcaagcctgttgacatgataatccagcttattgctgctcttcttgttcccaaaatagtgaatgtaaatattcatttattattaaatatcacttattattaaataagtgaatattcacttaataaatattattatttataataatattgctggggaacccaaatacgaatgtaataaacgatgacccagagctccagtgtggtgctgattaaaaggtttaggtgaagagctacagatgtctacttgggactcagatcaagaaccgatttctcatttgcttaaaaaagaagaatcatggagcgttttacagaagcagttgggaagtgaatgtgtgagcatcatactgacctgctgaggctaactgaaagctttccctgtcacactgtctcactgtacccttccacacggctttactttctgctcaaagcagcagctactctgccattgctctcatcagagtagacagataaaaggtcagtttataggagaggtcaggtgggacacagacaaagacaatagtgattagaaggacaaacagcagaaaagtctttcataatagtttagtaaaagcaatttaaataacaacaaacaatatttactaagtgattataatgtacacaccaccaagtgctttagggaaatcgctcatttctttttcacaatgaacctatgaattgggcatgaattttatccccgtgtcacaccgagcctcagaaagtttcataatttgccaaggtcacacaaatagaaagtggcggggtctctattcaaacccagctcatgaggcaccagagcttgacactacactgtgtaactataatgtcagtcacacccaaggatcaaatacctcttgtccacattatttatagaaaaatgttcttttgaattttaacacttaaaagtgtagagacaaagaaattatgcgagaacttggagtgtaacaaaaggtgcatttttgctaaaaactggctctgtgatctagggagagtcacccatgacctcttgactccagagtcctcagttcacaaagatagctaagctgcctcgaattctaaagttgtatggtgtttctgttcacacagcacttgaacatctacttactgcccttcacttatggatatttaattatgagtgaagggttttgaagagagactttatattattcacattatacctcttgcctctgcataggacctcacattcagttctaatctttatacgcaccagaaacaaaattacataaatctaagtaaacttgctcctatcaaatgtgctccggaaaattgccaagtttatatggatttttaaattttacatcaaacagatcctatcaactatttgtccctagaaaaaaaaaagatgaaaggccagaactgcctacaagttgcaatgtcattgactttccagcaagcattgcagctgtcctgggaaaactgaacctgaaatatgtttttgaaactgctgaatttcagcttctagtgtttttcacattttagaaacagggaaactattagctttaaaatgcttgtatttaatagtttttttcttaagcatttcaaaaaccccaggtgaaaagctaagtatgagaaaggttctcatgcaatcgttaatcaaatgcaactaggttggaagaagatacatgcttattgctttgcggaagtggcttttgttctaactgaataggttgaggtagattattcctatttaaacttagaaacggaacctctaatacaattgttaacattcctgcagtgaggtcgtttcatacaaatgtaactgtgacaggctgagatattccttttgcaaagcctataatctctatgtagttaatcagcataaagtattaaaatcataaatatgaaaagaatctcaaaagaaaaatgatttaaattactctaagactatacagactatccccaaaggcataatttctttaatagaaaaaaaaaaaacccacattgctttgagaacaaaaaagattctggattcttttgtagggctgcttgggccagtcccacctcttccacttgaagttttttgtttgtttgcttttctttgaatgtggagaaagtctctagcagccttccatttcctctggtctgaaagtctgtgtccctactgaagttctacagcttcttttataacatttcccatttgacactaattccaacagatgatgcttttctaagtttgtgttgtttataatttacagcacctggttgtagccagagtcccttgcatctccccagcagggtgtgcgggacccatactacctgcacccaggcctggctggccccgcccacaggccttagcttcctgcccagcttcccggctgcagtgggcctagctataacttgctctgttcccatggctgtgaagccatggccgcagcctctgccatctcatctcctcacgctgtgggttgcctctagctcccctgggggcttgggcaggccaccatcatgccaggggcgtcagaaccctggaaattctccaccctcctcaactcacggatgcgctggttgccccaagggctgtctggggggctcacggaggagagcctggaggagagggggaattgacactggccctcagagaggacacagagggcagagccagcagattcgagatgcagtagttccattagggcctcactcccatgtgacacaacagccgcccaaaagctcttgagaaactaagggcagctcagtgatgtgtcaccttgcatttgctttgccttttttcctgccttgtcttcagtctcctttcactcttgcatcctgggatggcatgtccgctatctcctcgcatacagtattagcatgtaagctttgcctctgcctcgggctctctgtcctagggaaaccagttaagtcctagttaagtaacagtaacaatccagatttcactctcaccactttgacatggaacctcctgtctctgatagcagccaagagggtcagaatcaccagaaggtatcacgtatgctcacaaagacgtgtgctcagccaccacagggttctcacggtgtttatttctatgttgtttctttgtccttccagcaggcaccgctgctttccatggggcataaactggacatctctttctcaccctgcctttgaggcactgactcttcaaggccccaacactgcacgatgttattttgcaaggaaggggagaacactgctctttctcataacatgcagtctgtcctcagaaagatccagtaacggtgggacttatgctccccattgtgaaaaagaattttaaacttgcagaggggagctaagtcagaagacaaatgcaaatggcaaacactcggggtaacttggatacaagcctctgacttaacctcagccgctggcttggagcagagaaagagggcatggagaagatgagtaagattctaagaatttccaaatgagtcattagaccaggactgaaacagtttgagaacactgcgctgggattcctcaggctattttacccaggactcatttccttactgcagttctgaagacaatgaccctggccccaggggtcggtccagtaggagggctgcaagggatcttttctgctgcatttacaacatccacgtattctgcagtcagagttcccaagaacaagccggagcacactgagcgctccctagggaggaggcctggggagagcttaagagaggaatgtactccaagctttatgtgcttgtaatttgtttatagtgctgtaaagagttgtttttcgatgggactgtcttctgagtcctgtacaataaaggacatacgtataaaactctaaaatgtaaattaaaagctgaaccaccataaaataaaggcagtttgtacaaactgaaatattcagtgctttgggtctgggtgaggtggaacaagaaaccctaggtaaattgtagcagcgttagatgtttggcctgtttaaagaaggatccttagagggatggagtcataaacacagggcacactggcctcagaacagaactgagagggctccagtaagcagagtggagacataaagcatcctgccatgtgcttacgatgtaggatatcgtcagcctctcagcatgagtcttaccctgtggaagaaagaagtggaaagagaggagaggagcatctctgagcagcacagctccacgcagagtttcaccccagtgcttctctgtgaggtgtaaatacagctctacagcctgggaggactggcagaggtcaccagtagcaaagagtgatagcgagattccacggtcatttgtggatgaacaggggttgttcattttaagaatattgtttgggtaaacaaacaaaagtcaattttcccgtgttatggaaatgctctgagaaaggcaacctcacacaaatgggtcaaagagaatgccaaggtatggaatgcctgcttgtttgcagaccaaaaatatctctcattcatacaagatagaatctagctggattttggtgtggttctttcataagcatctctcttgtgtggccgactgctcctattcagatgaataactatgctagtatcttgcatagctgatccatgaccctgctactaatttcctctaaacctgtctgtagaatatctgagtggttcaaaacccttttagttccattccaatcttcttcttctatcaaatccaactaggcaggaggaaacaagatgtgtgactcttggaaaaaaaaataccagcgatgatctctgagacctgtgaagtactggccctctttcaaatacaattcgatttctttctcacacccagcctttaaaaaataattagggggatctaatgcacattgtacttctgtgtgcatgtatttattcattcattcaaccattgctctgtgctttgtattgcaggcacttgataccgagatgaaggcaacagaatccagctctggaagatgttcactcactaggagggaggcagacccatagactgactcatatcatcagaacagaatcaccaaggagagatgctccaaactcagtttgggtgggggtgttagcagaggggcaagagggaggggagggagagggcgtaaagcaaagtgtcctggggcaggtagcacctgagccatgtcttaaaaaataagcaagtcaggtggaagagggcaggaagcttagaaggcaacgtgggtgagacgaagcaaagcaaagaggtcaacaaatgtgtggcgtgcggcattgcggaagaacaaagatgttaaaggccaggcctttctccctcagctatggaacctgaactccccttgtgggtgatgacaagcattgatgactctaagctgggtaataacacagtcagaggagtacttctggtagattattttaagaaaacaaggctgaagaaaagcacaacagttagttgttgccaaaaacaatgagggcctaagtggaggcaaaggttggggggagattagtggaggtgagacattcagatatttgagggaaatgttgggtaaaatcgattgcacttgctcgtgtattagaggtgggtgagttcctgggctggattgtcagcgtttcaatacctttcttcccttctatactctcctctgtattgaaggtgccagagccccagattattcacttactagccagcaggatctcatgttaggttcctcccatggaggtccccaagaaagatgcggaagacagaagaaaaggaaacttattattttgcagcaacagtgagtaggtgcatgggttttggcagatggcaaatgaggttttgccaggagcttctgcacaatctcctgagaatctctggtgctgtaaacaggtgagacctttggtaaaagtccctcagaattcctgcaatttgtttcccgaaagactagcagtggcttctctgacttttgcttctttaaggcttttaattgattctataatttcccagttctctgtactaaattctttcttgcttaaaatatctacagtgctttctattttactgaccaaacactgttggaatcaactgatacccaggtttctggcttaggtgaccaggtggacggtgaattagaaaattaattcattcattcagcattcatgatttactgaacatctactccgtgctcagggagtgctataggcaccagacacagggactcctatcaaaatgaccaatgctcctgccctcaaggagcttatctcctagaaggagaaataagtgatataagaaactaataattaaataatgtcatttcagatgataatgttaggaataaaatgacagaagaccatatgaaagacgatgtgtaggtggtagagtggtcctcttagactgaatagagaaaatcttactaaggaggccacatgtgagcctaaatgacctaagtgtccaaaaagctctagtcatgtaaagatctacttttggtttaaagtgagaacaaacttggttggctcaagaaagagactggaggtccatgtgactagagcagagtggacaagaaggaaagtgtcagaagatgagacctgagagttaactaaaagtcagagcatgcaggccttcttagccatggtaaggagttacctacctgatctcatgaccttactgtaaacctacagtgttgaagactggacaccccatgaaagttatatcgtacattaaaaggtacactggggctaaggggcaacttgatcagatttgtgttgaaaaatagtcactagagaaaccagcccatggaagcaaacagagaaggtaggagtgatggagtaaatattaaaaatattaaatttggccgggtgcagtggcccatgcctgtaatcccagcactctgggaggccaaggtaggcggatcatgagttcaggagatcgagaccattttggccaacatggtgaaaccctgtctctactaaaatacaaaaaattagccaggcatggtagtatatgcctgtagtaccagctactcaggaggctgaggcaagggaatcgcttgggcccaggaggcggaggttgcagtgagccaagatcacaccactgtactccagcctggcgacagagaaagactgtctaaaaaaaaaaaaaaaaaaattaaatttaacatgcttctaggacaggcagctggcaggcaattagataaataagactgctggagaaggtctgggactgaatatggaattaggagtccgtacatgggtgacactgggtacaccatgagtatatgcaataacacagggagtgtgggtagaaagaacagagcactgagttatggaagactttgtagaacaactaccctgaaaggcagctgcaggaaaaggcccccacaaaaggaggatgattcaatgggaatccggagagtgtggggtcacaaaagtctaggtagtttcactaagagaaagcaaaacagcagttaacacaggactgagattgggaacaaggaaaaggtatccactttcaccattcctattcattattgtattggaggttctagctgtagcaattagatttaaaaaacccaggatatatatagaataaaagagaaataaaacggtttttattcatagatgacaaaattgtctacatagaaaatctcaaagatatgcaaacaagctactagaattaataaaggagcttaacaagattgcaggatataagtaaatatagaaaaatcaataattccatatggtagaaataaacaatagaaaatgaagattaataagcaataccatttgcagtagcactgaaaaaatacttagaaataaatctaacaagatacatgtaagctttgtatgctgaaaactataaattattagttataactataaattattaatgaaactaagtaagacctgaaagatggagagatatatcatgttcatggatgagaaaactcagttgtgttaagatatccattctctccaaatagatcttagattcagtgcaataaatcccaattaaaattcaatttccatcaaaatcccagcaagctattttttgaaatgggaaattttattctaaatttgtatgaaaaatcaaagaaagtagaatagcctaagcaatgttgagaaagaagacaaagttggaggccttacctacctgatttcatgacctcactgtaaacctacagtgttgaagactgtacactctatgagtatatgagataacacatcccttccttggaggaaggcagttcacatagatcagtgggagagaacagaacccacaccttcaacacaagtgctaaggcaattcaatggagaaaggacagtcttgctaaacaaagactggaaccatatgtgtaaaaatgaacactgataaatacactggaccctatacaaaaagattaacttggaatgggtcatagagctaaatgtaaaactcaaaactataaagctaacaacagaaagacaaagaacccaattcaaaaatgggcaaagggctcaaagagacatttctctaaagaggatatgcgaatgatcggcagacacacgaaaagatgcccaacagcgttggtcaccagtgaaatgcaaaacacacccacaataagagagcacttcacacccatgagaatgacaataacaacaacaacagcaaaaccagaaaataacagatgttgctaaggatgtgaagaaacttgaatactcatatacggctggagggatgtgaaacggtacagctactgtggaaaacagtttcatgattccacaataaattaaacacagaattgtcatatgacccagaaattctactcctgtgtaaaaagtgaacacagatcttcaaacaaaacttgtacaccgatgctcacagcggcattatttacaagagccaaaaggtagaaacaaaccaaatgcccaccaattaatgaatgaataaagaaaagatggcatattcatacattgaaatattattaagccataaaagggaatgaagtactgatacatgctccaagatgtagaaaccttgagaacttatgctaaatgaaagagtgagacacgaaagactatatgtaacacgattccattccatttatacgaaacactcagaagaggcaaatccatacaggcaggaagtaaattagtgcctgcctggggctggcgaaagagaagaatggggattggctgcttagtgggtatggggtttttagggatgatgaaaatgcttttttttttttttggacagggtcttgctctgtcacccaggctggagtgcagcagggtgatcatgactcactgcagcctcatcctcctgggctcaaatgattctcccacctcagcccccctagtacctgggactactagtggacaccaccaccccccagctaattttttatttttaattttttgtagagacagagtcccacgaggttgcccaggttggtctccaacttcccggctcaagcgatcctcccaccttggcctcccaaagtgctggtgttacaggtgtgagccactgtgcctggccatgaaaatgtttttgaagtagatagtgatgttggttttgcaatattgtgaaggtagtgaatatcactgaattacatactttaaagtggttaaaatggtaattttaatattatgtgcattttgcaacaataaaaaaatctgtaaaccttatagaagaaaacaaaggagaaagtctttgtaaatttgggttagaaaaaatgctttatattgcacacaaattgcacaagccataaaaggaaaaattaacacactggacttgatcacagttaaaatactctgctaaataaaagggaaaccacagaaagggagaaaatattcacaaaatatgtatctgataataggctggtatacagaatatataaagaatgtacacaactcaacaataataaaacaaacaacccaatttaaaaaaagaagcaaaaaaataggcaaaagttttgaacaggtactttaaccaaagaggagatgcagatctaaatatggacatgataaatgctcagtaccattaatcattaggaaaatgcaaatgaaaactattacacacctttcaactggccaaaatataaacaaaacaaaatctgacaatatcaaatgctgacaaggatgtggagcaacaggagctctcattcactgctagtggtgatgcaaaatagtacagactccttggaagatcgtttctgatactgttaaacataaacttcatgccacctggcagtcccaactccttggcatttatccaagagaaatgaaaacatatgttcatacaaaaacctgaaagtgaatatttatagaggctatattcatggtcactaaaacctggaaacaacacaaatgtccatcacctggagagtggatacagaaacgatggtacatccatacaacagaatgttactcagcaacaaaaaggaaaaggccactgatagttgcaacaaatggacgcctctcaaatgcatcatgccagtgaaagaagccagacccaaaagactaagtattgcatgtttccactaataatacattctggaaaaataaaactatagggacagaaagcagatcagggtttgccaggggctggggtcagaaagaaaatcaactgaatggggccaaggaccctttttgaagagatgaaaattttctacacattgatgtgttggaagttctgtaatttgatacatttttcaaaattcatttatctgtactcctaaaaaaggtgaatactgtatataaattatactttcataaacctgactttaaaacatgactgagactatcacttggttaaggctaaccaaaagggctttggcaatcctattgggaacaatttcactggtaaagcctgaagcgagactgagataatagcgtacatttattcaatgaggtagaaagcaaggcagagaataggaagcgggtgcttctgctgagtgctccattaatcaagttaaactgttatttctttccccctaggcttgtaattcaaaccagggaaagtttgggagagagggggaagggggagaatggagttatgattcagaatctccaagggcatttgtgtttgaaaattttatttatgatatttaaatttagagaaaaatccctatttgtcaaataaaaactagggaaaggaaagaatgataacacctttggtagatgaggatatccagaataaaaacatgactcactggggccatgctccctggggattctttggtgtggcgggagtggcgatagagacaagattttttataataaaacatggcaaaggataaaacaattagataacttctgtccccaaaacttacacttatcttgtgtttaataacagattcagtgttgatagagtctgagagtattcccatcataatgtaagtctgctccagtggactttttaccactttgtgtttgagcctcaattagtaggaaacaatctgttctaagataagaaatcaaaatctaattttgttatttctccctagtgagtggacactttctttgggattggagaaaagggactgaattggtttccctttaaaatgccttcagtatcttttggattggtgcaccaaattctcactctgcccagtgtggaggtgactgctgagtgccgaaatgccaggaccagaaaatcaagctgaacacatgcgtcaatggtgaacaattatagctcagaatccatcctcgcaggatctggggtccctgtgattgtatcatccagacatacatcctcctctcctcccaactgcagcaagtccaagccagatctcgcaggatgagtaagcgacatatggcatgtgtgaaattccactccaccctgttgcccttcccagagctgctgtagacggcagcaacgattatagcaaccttgactccataaggaatgtgacaatttaaaccctgcagactgtttagcaatgagttattccaagcagtaagttgtaccctagagccctggaatgaactgaagaagcactgggctcacatcttaggagatctgttcatcaggtagaaactggcttcatcggcaaggattgagatttttctgctatcgtttttgatggctagtctcatcaaagagcaaacagcatgtctcagattacagctatcagtcctttggcattccgcaggcttctcacattcatgccgagtcgcagggctgacctggcctgaattgtgggatctgaactctcccagaaatttaagaacccccaaatttgtccccaggtcatggtttgggattggggccacccagaaaattcgacagactcagagactccttgagaatgatgctttaagctgcagtctcagataccccgaaattatatgagtacagtggaatggaggcagagaaggggatgcgcggtgatgactttttcataaaggccctaggatccaggtcaagtctgtagtggtccccatgatgattctgggcttcaagggtattctggggaaagccaacctgcagggattcctgagtgcctttaaccacagaacccctaatatcatggaataaaagagaagtaaaagttattggacaaggaatggtaacttttagttcatgaaatcctttgtgacacaccatctcaacttttgctttggcaaattttttttccatgtcaacaactgctgtgactgattttgaaaccaggaaatcaacttgaatgcaaataaaaattcaaatggatgcaaatttatgaaaggtaaacttttaaaaaagtcttagaaaaactgtcacacaaatgaagattctagtattctagtggttcagaattaagtccaggttttaaatgttctttataaggatatctctttttttttttttttttttttttttttttttttttttttttaagaggcagggtctccatacattgctcaggctagactcaaactcttgggctcaatggatccccctacctcagcctcccaagtagctgggactacaggcagccaccaccatacctgtctaggacatttcttgacatagtttgagccttttatctgacggttaagtctgctgggttcagtactgtttcatttctatagataatatatcctaaacattttcaagttacttgagattattagatgcagtgagatgaaccaaactaaaatatctcttgtagccctttcactagctgtggcttatttatattaaagaagcacacagtagtgacacatctgtgacacagggacttgacagctgctaggtggtacgaaaaggttggttgttttgtttattttggacaatgcccatcaatcacgagaatgatgttagaaccacctcttatatagctggcccttactgaaacaagcactgttgttccaggaccctgtcagattagggctccatcagactgaaagagtagctttttcctgctcagggtctaataaagctcctggcatcttggcacacccttgttgaccctgttgccattctagagagcagacactacccagtggagccaccagagcttccccaaacccactgcgaattccgacttgagacactgcaaggctcagcccattgtattttgaagtaggattttccttaatgaaaaaagtctttttcattatttctgtccaatcgacagataaagaatttatgaattccaagtcacaaactgggttagattgtcgcctgccactcttcctctccctgccatttttttttttttgagattctgagaattttcccattataaaataagtccactccagtgcagataattcctcactcacatgctctgaaattcttgcttctgcctaaaccctgtcctgtctctgtgattactcttttagacataatctttgtggcttcaccccttgttgcagaataagacagtagcccagcaggccacactctcacaggggcaggcctgggactttgcctataaaatagaaaatcagctgcccattttttcaattccaatgaatgtgtaactatcaaagagcttattccatctggtcctgttcacagaagactgagagacgacagacaggaatgttgatggccaaaccacttaatttctattgagtctaaaaaagaaatgaagaacagttctaggctgccagaaaacagaagataagcatatggttgttaaaattacaagaacaactggggcagaggagacaagctgcttgcaatggcgtaaggatttctacgttgcgttttgatccacacccaccctggcaatgactgctattgcataagccttcaattcttcaggcctgtgcagatactgatttagaattggtctctggcttgttatgaaacgaagctctttcatggcacaaatgtggagcagaggcgaacctggtttgaagatgcctatgagacctatattctcatcctgcccctcgggcatgagtcaccacttccccctaaaatatggaaaaatgctaaagtgactttcatgtgggatgtacaattggtaatgactgagttgggaaaaacacacaactccctgaactatccacatgccatgagttctcaaggcagtcttgctgagatattataggaagtctaacattctgctgacttgtcccatatgtcgagagtctaacaattttacaaacaagttgttagagggaaagaggacagtgtcttcatggttgtcagagagacccaagcaaatgacagcatgtagctccttggtatcctggcatcactggccttggaaaattttgctgcaatgatagctctgttctcctacatcaaaatagggacttaatgaatttgatttgtgagtgctattaaaaacccatcttctcttctttgaacaagtaagcctggtcaactgcctgtgctgaaaaccactgaagtgtgtatatcatatgttttacaagactctagttctattgagtcgggttgaaatatgcttaagagcatgtgatggttaattttaatgcatcaacttgactgggctatgggatgcccagatagctggtgaaacgtgatttctgagtgtgtctgtgagggtgtttctggaagagatgagcatttgaattgatagacttgaataaaaaagatccaccttacccagggtgtgtgggcatcatctcatctgttgagggcctgaatagaatgaaaaggcacacgagggtaaattcactccctctcaggttgaattgggacacctatctatctcccgccctcagatgttggtgcttctggttcttgggctctcagactcagactgagacaccaacggctttcctggttctccagcttgcagacagcagatcgtgggatttcctggctgccataatcacatgaagcaatttctataataaatctccatatttatgtataaaacatatattctctggggaccctcggctgataccaggtgcacttgttaaaaatcatttagagtggagaagatgagtagcttatctttcatattttgcctctgacatggctattgttaaactcggaaaacctgtatcttcccagacatgaagaaattcaccttcaactaccacaaagaccatgatttggtgtttacaagtttatttagaaacaggtattttttaaagtggttccatattcttttacgttcctttaaggaaatataataatatgattataaaggaaaggtggattgactcacggtcatctctatgagacaggaataagcaaggggttgcacttacaagctgtccttttgggatttttttaaaatcatattcacatatatatatattacatcgtgtaaaagacttgtgatggttaatactgagtgccaacttgattggcttgaagaatgcaaagtgttaatcctgggtgtgtctgtgagggtgttgccaaaggagattaacatttgagtcagtgggctgggaaggcagacccacccttaatctgggtgggcaccatctaatcagctgccagcacggccagaataaaaagcaggcagaggaatgtgaaaagactagactggcttagcctcccagccttcatctttctcccatgctagatgcttcctgccctcgaacatcagactccaagtccttcagttttgagactcagactggctctccttacccctcaagcttacagacagcctattgtggggccttgtgactgtgtaaattaatacttaataaactcccatatatgtatcctattagttctgtccctctacagaaccctgactaatataagactgtagagaaaaacttcatgtatgtaacagggacccttgcataacatagagcttagcttataccagaagataattgtttgatgaatgaacaaatcctttcagggtacaataattcaaagcttttaatacgtttagcatagcaacaaaaatccatggagtcaacacagctacaggcagccgatccctgtaaacatccccagggcactctctaaaactgtaaattcggctcctattttttacattctaacacaccctctgttaaggccactaagtcactcatctctcaggcaggatgaaacagaaaatagcttaaggactagcgctttcagcccattgctgtaggttcaccaacctcaatgctacctcttattctagactggtatctgcagagtgagatactattctctctagtcccagatcatatgcttcttccataggtataggtaaggtcaccaaccaaaaaatggagtccatactctgacaaatacaatcatattcatgggaacattttaatttgagtctatcctagaaaactcaggtcatttggttgttttgtagtgttatgttccacggttttgatatggctgtagctttctagagatttccttgaatgataggaaaaattttaaagagaaaaactgatttccacattcgagttgcacttcagatggaatttgtgggctgccaaattctagcctctgcggtaggttattctgctcacagctctttctaatattcagtagagcgggcttctcaagtccacccacgaccccaagagtagaggcatgtggactgaaaccatggtgtctgggaagagttggcacacaatgtttttgtggtttctctttttgtttacttgaattaacataaaaacagtgctttaaatcatttaccaccacgcaaatcaccacttgaggatgctgggtctctgtttgaccccttggtcctggtgttcactctccctttgtgcctgccaccctgcaggggtcctgaggaaatcatgaaggtcactacactttaaatataagtgatgggagtgggttagtggaaataaactcccacaaatatacaggagatgagtatgtgtatgtacagcatgtaaaataccttctccctgcacatgtctagtggtgaccctgagctggcttctcagtgccatccttaacttgaagaaaaaggggaaggaaatgataatatatgcttggagtttcagataaataatagcgaccatcacaaccatctggggagtgaggtatgatgaggcttattttatggatgaaacatcaaagctaaaagaaataaaaccacttctacaatgttttataggacaaagtatgtatccttttccaaatacatatatatataagcaggaagtatgctatctttgaggtattctttaaggcatgatctcggcttcttctagttcgttcatatacagaatttctacgacaccccaaatgcaccccaagaaatgtacttgggatagctattcacacgggggccaattagggcagctggataatgctttctttcttgtgagtataaaaaggagaacatgagagggatacaccaatgaggtacaccttctgcccagttttggggagaaatatgcaaacttatttttaatgtgagctataagtgcaaactttgtttctctatattgtatttgtaaaagttctcaaacattctcccagatatgtgtatatggtattataaaagaaatgcataaaatattatgcctcagacttggagtagaaacatggcgagtgttccaaaataatttttttaaatggagctgattgtctaagaacctggaatgagttttgaggaagaaacagagggaaaatcatttttgtatttactaaaatgaaggcaaaactatgaagtctttgtgtctgggacttttggtaaagctttcagtgaacaccaaatggatgaaggaaataaagatgtgttattcacatgttactctggttacttataggagtcagagtttaagaatagtctctgaaatgaaatactccatacgtgaatcatccattacagtcttcaaacaggttctatactaaagagtgtgacaagcgtttctttaaagaatgaacaatcaggtgtcatggaagtacagaggggagtggttgaggaagtcagcccagaggaagcagcacctgagctgagctctggaggtggtgagtgatgggtcagcaagggggtggcggagtggacattctaggcagggacaaattcacaggaaatatgaaaaagactaacagtaataattgttcatttttaagcttggctacgaaatgcagtggtcccatttgaactaaaatctaactctaagaggtcactgaagtagaaaaatggaacttcttcaccacatcttcttcttgaggggaagtaagcctgtcctcgtatcattagactggcccagtgacatgctcctggctacagctcactgtctcagggaacggcagatgtctgaagccaggcaaggaacacagttggtgtaattcacatatgggatattcttagcattgaatactgttttctttcagtcgcttagggtatagtatggttctttgtcaaaagatgacaaagcgctgccttggttattcagtttgtgaaatgaatcacaatgctttaatagaatgaaatctgtctactgtgaatctgcatttgaagttaagagattctactctcaaagtgtttctcttaatgggaaagatgcccaactagcaattcttgtggaggctacagaaatccccacaagaaagaggaatgaagaagctgcacaaagagaaatagagaagagagagagagagagagagagagagagagagccttagttagtttactgagagagaacgtgctagtccctgattccaaatgcatccttgcccttgagtgctgtgaaactctcctgtaacattaaaatgctttccactagaattagtgggtttctaagacttaaaataagagcattttatatacacacatttatatgaagacatcataaagacaataatctcgttatatatttatatacacacttaaatgacataataataaagaccagtctaatggtttatttgcctctgtagaaaccatcagagactattagtttctccaagcattaattgctttgtctggtccagggcatagtttttccttgaaatacagtcttacattctcctcaggattttaggagctattgctgttttcaggttagtaagtgaggccttcccctctgaaggcgtcaggtttatgaagagttcatttgaagctgtgcatagggtaaatttaccttcaactacacaactcaggtgtgagacgtagataaagcttctgctccagtacatacgtggacacacacattcatctattttggggctccacttaatgtatcaatgtttatgagtgtacctcagaacagcacatagcagacatagcaaacataagcactttacaccgagaacactagattttattaaccacttgaaatccctggagggaaatgtcatttcattaggaggctccttggctgctaatcaagggcttttcatttccttaagtacattgatctggtaacaaattttcttctctgaaaaaccattcgggaaagcattttctaaaagcaaagtaagaaaggtctatttatctttggtaaatacaaacactgaagaatcaccaggaattaagacagaatagaaaccatgtgtctgtaccctcataagatactgggactcccaccaaatccatcatataacttattacgcaccaaagtcttccttcaccaccacacatcctatctaagatgtttgctgttgtcatttacatctgggaccctagttagcatgaagatgccatgttcttttagttacttgaagtaaactatggtaagttgtcaaaagatgacaaggcactgccttggctgttaggtttatggaatgaatcactgtgtttaataaaattaaatgtgcctttgggattctcagcacatagcacaataaatgttaagtcaggtataaactgacattttggattacaacactgttgtattttccactcaaatttagctgtttctgaaaatgtatatgattcaaacaaacacaggagttcaaatcagtgcatttctcacattccgttctgttattcatttagtccaatgttcaatttaaagcatgcatcttaactaggatgttcctagtttacagtaagcagtgtcatgcagtagaaagatcatgggtttcatgatcaggccagattctaatttcattcttcccacacagctctatgtgaccagggcgagtttcttaactcattgagtttttgcttccttttaggtaaaaccccaagaataccatctgactgccatccaaaattatagcaaataataaataagattaagaattaatatgcctacacctctgcctggcatgtaggagacacacaatagaagtcacttcttccctgaaactcccacatttatgaccccactatcttgcctacagctaaatcctttgtgagctttataaatctctagatttttgatagcattaaagcatctccagtaactttttttaaaaaaggatcataagttaaaatattctattttcctttactatggctatggtttgaaatatgccccaaatttaatgtggtggaaatttaacccccaaattcatatgttgatggcatttggagatggggcctttgggaagtatattagttcattctcaggttgctataaggaaatactcaagactaggtaatttataaaggaaagaggtttaaattgacttacagttctgcctggctggggaggcctcaggaaacttagaatcatcatagaagatgaaggagaagcaaggcacatctcacaaggtggcaggagagagcgtgtaagagaaagcgagggagtaccacactgaaatcatcagctctcatgagaactccctcactatcatgagaaaagcttgggggaaactgccccatgatctaatcacctcccaccaagtcccttcctcaacacatagggattataattcaagatgagatttgggttttggacacagagccagaccataacaggaagtaactaggattatataaggtcgttagtatggggctcccatgatgatggactggtggctgttgcaggaagtcagggaccctgaatggagagacctgctgaacccgcagcagaagaacataaattgtgaagatttaatggacattgttcccaaaatgaatacttttataatttcttatgcctgtctttactgcagtatctgaacataaattgtgaagatttcatggacacttatcacttccccaatcaatactcttataatttcttatgcctgtctttactttaatctcttaatcccatcatcttcgtaagctgaggatgtatgtcacctcaggaccctgtgatgattgtgttaactgtacaaattgtttgtaaaacatgtgtgtttgaacaatatgaaatctgattgtaaaacatgggtgtttgaacaatatgaaatcagtgcaccctgaaaaagaacagaataacagtgattttcagggaacaaggaaagataaccataaggtctgactgcctgtggggttggacagaatagagccatattttccttcttgcagaaagcaagtaggagaaatatcactgaattcttttcccagcaaggaataaccatggggaaggaatgcattcctgtggggaggtctatgaatggccgctctgggagtgtctgtcttatacggttgagataagggatgaaatacgccctggtctcctgcagtgccctcaggcctactaggattgggaaattccagcccggtgaattctagtcagaccagttgtctgctctcaaaccctgtttcctgttaagatgtttatcaagacagtgcatgcccagcaggacatggaccctcatcagtaattctaattttgcccttgccttgtgatcttgctctgcctttgccttgtgatcttttattgccctttgaagtatgtgatctctgtgacctactccctgttcatacatcccctcccttttcaaaatccctaataaaaactcgctggttttgcagctcgaggtctccatcacggtcctatcaatatgcgatggcacccctggaggcccagctgtaaaatttctctctttgtactctttctctctatttctcagaccggctgacacttagggaaaatagaaaagaacctacgttgaaatattgggggctggttcccccagtagttggctttataggaagaggaagagagacttgagctccaaagctcttgctttctcaccatgtaaagaagaaggccctcaccagtcttggacttcccagcccccagaactgtgagctaaataaacctcaattctttataaatcattctgtcttggtattctattagaacaacagaaaacaaactaagataaccacttaattttgtatttttaaatctcactttttctcccctttctcccttatgcagcagaaaaaaatcatggtaaaataagatgcttagcacatgttgggtatttcagattgccatttgccacatttcctttccaccaggtgccttttagctgaggttgccataagcactgacatctcttaagcaagttcatagtgggccactaagggagagacacagacaaggcttaaagaaacccacatcacctaccatgatgattaagatcaaaatctacttttaaacataaaactgaacacgttttaactaaagaattaattggcttcatgaacattatctttgtaataatttgagaaaatctaaaaggtatggaaaaaatgtgacaacttttcattttctttccttgtgacaacttcatttatttcttgcagtaaaagcaaaatcaggctaagaacatcaacaggagtctggagatttgcaacagtctctattgatgccttgaaattactgattatttattagttcctgtaaaacctttgaaattttctcatttttgagattgtagtccacttacacaatataatgagtatatacaaggttttggtgaacccaaaaggctagtcgaaaacaagcatgagaaaaatgttgcaggaaattgccaagaaaacaacaacatacttggcttgttggaggttaaggagtctattgtttgtaaggaggtttctgctgggtctttaaaaacatatactaatggccataacgggacttatttcagtcggaaaacttgaagacaaagaattcattctgtgaatggactgtgactttcttgggattccttagggtagaaaataaacactttcagtggttatttttcccatgagacaaaactgaaatatttcagcagagcataccttatcctcccagctgctcctccacgctgtgcctgcctctctcttatctcttaatccacttccctcacaccctgcgtttcccacactctgtgcagttcctcaaagtgctgggcgattttacaactccagcctttgccagtctcgcttccttgctaggaacgtctgttctcctctgcaagatcactcttccctaaagcattcctgactccctcattctcatggaaaattgaccactctctcttgtttgggcccccatgattccccataaatatgtgtattctagaccctatgatacatattgtttttgctggtttatgtacccatctcctttagtagtttgtaagcctcctgaggtcagggatcatttttaagtcacctttgtttctcaccgcccagggcacaatgggtgacctataaaagatggtgaataaatgggagcatatggcagaggcaatagaaacttggagctacagggaatgcataatcaacaaaaaactaaggtgctgatggcaattagttccaaaagcaggtgcttagagacaatgaacaggtaaagaagcaaacactgtgagtcatgcagagagatgaatggtaagtaaacatgacactaagtatttaaatttttaacaatatgctcaagatccttccataatttattattaacatatttttcctttttaacattggaggttgcttaaaggtggtccatacataaaaggtcacttgtaattgtataagcaggtgcaggttccagaaaactttccactacatacgaaaaaggatcacacaaaatataatgagcaaatggagatggagaagagcaagagaaagaaaactggctcatttattcgggaagcaactgttgaaccctataagtctcaaagactgcaccagctactggatgaataaggttgatatggtttttcttcctaacaagcttgcattccagagcagaggatgatggtaaataaacaaacaagtaaacaaattaatagttgacaatttcgataatgagtgccatgcagacaataaagagagcacgtgacaaagcagtgcctgagggctggctttagcttggctggttagaaagggcctcacatggaactggcactcacgctgaagccccattcaacagaagagttgtgggagcatctgcgagaagaatgttcttggtgttggtgaaaagggtcaaactctgtaaaatatttggagaggcttgttctgagccaaatgtgaggaccataatccataacacagcctcagggggtcctgaggacatgtacccaaggtggctgggctacagcttggttttatacattttagggagacataagacatcaatcaagacatataaggtgtactttggttcagtctggaaaggtgggacaactcgaaggtgggaggcttccaggtggattcaaagactttctgattggcagttggttgaaaaagttaggttattatctaaacacctggactcaatagaaaggagggtctgggtgaagataagaggtcgtggaaaccaaggtgaagcctccagtagcaagcttcagagacagtaggtggtaaatgttccttatcagacttaaaaagatgccagactcttagcttattctctcttggatcatggaaagggaaaggggttctctgtagaatgcagactttccccatgagacagctttgctgggccatttcaaaagatgtcaaagaaatacattttggggtaaaatacttcaacttctttcagggcctgctgtctatcttgttggcatcattgctataaacagtctgttttgtcggcagatttctgttttaatgttcatgctggtcagtgcctgaactccaaaggtaggagggtataaggagggatgttcaacttccacttcccactgtggcctgaacgaatgttttcaggtttctttggaatgcccttggctgaaggtgaaggtttctttggaatgtccttcgctgaaaatggggggtggggtccatcagtcgggtggggggcttagaattttatttttggtttacatgagcatacggaatgtgtgagtctgtgcagtcagaatgtgttttgagtgcttgagagaccaaaaggaagctagtgtaggtgggaggacaggaaggattcaaatgatgaggctggaggaggagaaagaaggcaggcagctaacagagtgctttagaggtcccagagaggaatctggatcttattccagatgcattttaattaaaggggtggaaaaagatctgacttctatttttttttttttctttctttttttgagatggaatctcactctgttgccaggctggagtgcagtggtgcgatcttggcttactgcaacctctgccacccaggttcaagcgatcctcctgcctcagcctcccaagtagctgggattacaggcacctgccactgtgcctggctaatttttgtagttttaacagaaatggggtttttggccaggctggttttgaactcctgacctcatgatccacttgcctcagtctcccaaagtgctgggattacaggcgtgagccactgcgcccagccctgacttctattttatagacaacactttgcctgctgtgtggatacttgatactagggggcaactggaagctgggcaaggctggcaatagtccggatgagagatgacggtggcatgaacaaggtgctgggagcagggaggagagcattacaaccacagcaactaccggagtagagagtatgcagaggaagaaaatttccagaaacactatacaaattgaataaaaaacagtgtatgtatatgtgtgtgtgtgtgtgcttgcaagtgcaaaagagagagagaagcattactaagagcaacagcaacagggggacccagtaggtgttgggccgtgactacagatccggtgtgaaggtgccaggctttgcagcttcaaactgcacacaggcagattctgcagggccttgagccttgtaggacatggtatggggtttcagtgatgtgaaaagcaatgaagaatggctactgacaggttgtagaggcatgagagcgacaggatatatttgactttgagcaaattgcatttattttacagtaaggactgtgaactggtgggtcccaagatgggagtccaggctcgccatgatggcatggctgccaagggaatttctcctcctaaacacaaggtccacttagatccctctggtggctgagatcactgcttaccttgcggtgcacttaactaagcccttgacttctttacaaaactcttagctcactgaaggcagccactgcctgtgatgtatttttcaaacagttaatagtatttcacacacaatatgcaagaaatacatatttcctggatgaatgttccacgttacatgatcatttttgccctggtgtgaggaagcttgcctcttcttcctctgcccttcaacctcaggtccccctcttgtttcccctccactgagggtggtggtggggctgtcttccctcctcaaatacacctgacacctctggattggtggttaagcctgaacataattacagttgggcagctggtacaatttgttagtacccatccgccttctcttgtagagcccctgggactcttgtagtcaaacctgctcacgggtctagtgcctacctctatgccccctcatccctgcctgtgccaatgcactgcacgccaggccagtggagaggtgggacacggaaggaatcttgagaagctctcaagaaccttaaattattatgttaaggtataccatgctaattagactaaaggcacgtccctccacctggatttgcatttttacattaggggaaacacggcattaaacatttttaaagagcagtggcctagaataggaatgatgggatctgccttctttcaacaatgtgtataatatagacctttattgagtgcctgtgtgtgccaggcaatgtcgggtactgaggttgaaaaagagataaaaatgatatgcagtcctataaggatattttaattcagttagggagacaggtacatggatggatcattacagtactgtgcaacgtcctatgcttatttccttctggaatttatcactatctccaattcaatatactcacagctttaattcataaacaaaagaccacatgtttaatatactgtcttcttatttgtttagaattgagttatttcacagattagtttagaaataccagtgctattgcataggattattttcattattcagttttcaagttttttatcttgccagggtctttaaattcatttatcatccttcttcttgtttagaattaaacctccagttttaatggtatttttatgatttctaagcagacatactcagaaactgtaattggagtgtggacctaggtggaagatgtgtgtcacctccaaagtgtgaaaaatcagcttgtccatttttacatttttattaatctatcaaatgctatgattgtgaattaaatataacctcttcattataagcctttaattttctccccattttagtgttgtttgtacaatttagaaagggctatatttaacaatatggggttctttaattttttagctatgaaataaagcataaaaagaagataaaggtctctacaggaacacagattattatttacaaagattaaccacaagctttccatgttttccatcctatttattgtggtctgcaagataaggtgaagtatgcaatggctaactcttgtgttatagttaattttaactctcttatcaataagcagatgccttttcaagttataaaaagtgtgccattattactatcaactggagagaatgaggtcattgttctcattatactataaaaagccggagtgtaacagaagggcaaaaacatacctcaagaaaaacactcatgccaccaacaaaatacctttgaagcaaagaatatcacattgaattttccccacaactaaacattagattcaaagaaagagattaaaagccctgaaaagaagtggtctcttagaattaaaggaccacgtttatttttgtgatgctccgtttattacttgtacagtaagacttttacatgctgatttgtaaacttttctataaagcaaaaaactaggatagaaacatccagctgaaacttactattacatttgaagatttgaaatcatcaccactatcactatatttgcttcatcaaatttaattttaaagatttgggaagtggaggcaggcaaagaattatttaacagtttactaagagaaaacgccttggtaagagcaaatagatcactgaacggccgggtgcggtggctcacgcctataatcccagcactttgggaggccaaggcagtcagattgcttgaggtcaggagttcgagaccagcctggccaacatggtgaaaccctgtctctactaaaaacacaaaaaattacccgggcatggtgtcaggtgcccgtaataacaactacttgggaggccgaggtaagagaattgcttgaacccaggaggcagaatttgcagtgagctgagacgaagccactgcactccagcctgggcgatagagtgagactctgtctcaaaaaaaaaagaaaaagaaaagcatatcctggacggtgggttgtgtgtactgagaatgggggaaggatgaacgggaggggcggacagcagaagaggaggagccgatgctttgggctcaatctttacctgccccgcctggtccatattcttgctaccttcccagctcccaaaatgaaagctcagtttcgacattaccatgggcatctttctgttgcgttttcctgtctttgatatggctgccaagatggagtaatttagagttccctttattattcaaagagaatagttcacataagtttagttatcaacctccaactcaagtgacggaaacgttaagaggtgcggtgacaacagcgcaccgcggccccctgcacaggaacaaggggcgggaatttcagggactccactgtggctgctgcatctacctgctggcttccactccttgccccactcccccatcctcatcaacacccactaatttaactctattggaaatcatcctcctggttgaagtgtcatatgcaaacctcagacctaaaatcagcagatgtattattaccggtctcccttgagaactggttaaaaaacaacaacaaaaataagaacaaaacctgaaagacttaggagatctataggctttaacgggtattaagttctggaatgggaacacggaaacgtacagaacaccatttcaagaacatccttcctaaaggaatgagttcatccactcaggacattttcaaggcactcttagcctaacttttagacgtttccttccactttaagcacgttatatttttctttagtcctcgataatgtgacctctggttctggtctcagagaacgctagtcaagctgtggcaccatcgggttttaaagtctgctcccaattttttatcagatactgtactatgaaaattctagctctttcttgataaacatgccttttaatttatcttacacaaggtgctgagatttttcttttaatgataaaacagggttggctctgaaataccaactgtccacaaactggtttcaaatggcatgatgtaactaggctttttgccatgggtctctgtgaactctcgcccaggaaatgcaggttttgatatgtacaaattgccaaaggaaattccagaaggcctagaaagcctaaaaaatgcagccatatttaagagtgttttctgttttctaattcttgcattggtttctgtggttaaaagattcctgtcaccagccagttgtcattgtaagatactgattaccaaggagtggccggggttgctagcgttccctgagtaccagtgctgagattaaatgtgccagtgttcccagcctctcagcaaacaaaccaagcgcagtgtttaccaggaagctgaaatggagaacctgtcccaaatcagacttaatttcatttaattcacttaccctaattgttagtaagaagactgaatttaaattaaacactttgccttggaactgggttttacttaaatagaactgtccctcctatggaaaacaagtatacactcacatgcatattgcacttaatgcacattcaattttgtaagggacatgagccccattcaagagcgtcatgtttcttcctcctgtttcttgttccatcctatacagtggaggtaataacggattcgcttgctttagttcaaatcattagaaagaattatttctaggcaaaacagagacagtttcacctcatttctcttttttctccatctcaaaattgacagttctaatctacataacaaattatactttatgacaagctacttgtttcctatcttgaatattgtcttgaaacctcagtaaaactcgtagattactgccaccttgcaatttattttatcactattgctaccatatcctgaattgccagcaccaataaatgtacatttcttaatacaaattgcttgtttcagtgtgcattctatgcccaagcattggcattacagaacaagggaataaaggcaggactctgagttatgagaaaataacacagtgctctaatgaggagagatctccttcaggagtaacgcaatgtatactaaaatattaaaggtttattttattttattttattatttatttatttattttgagatggagtctcactctttcacccaggctggagtgtggtggcgccagcttggctcactgcaacccccgcctcccaggttcaagcgattctcctgcctcagcctcctgagtagctgggattataggcatgcaccaccacactcggctaatttttgtatttttagtagagatggggtttcaccatgttgatcaggctggtctcgaactcctggcctcgtgatccgcccgcctcagcctcccaaagtgctgggattagaggcatgagccaccgcgcctggccagaaggtttattttaaagatgaaaatagaacttcctattagcaaagggctaaataacttttagctactttaggctttgagttatgacaagatgatccctcttcacctgatatgaaaacaggcacgagtagagagaaaatgcaccagggtggacggacttcctgtcatgtctgcaagatctatgtttgcatatcttttatttcattttcatctataatacagtaggtggacaatcttagtccaagaagtcagagggaggaatgatcacatttcttgtttaagtcagctcaaatttgagttcaaccattggactgacaggaaatgaaacccaaatcatccctgcttgcttgcttccttgagctctattcctgtcatgcaaaggtcctgacaccggtctaggctaggattgaagggaggtcccaggcattaggacagatgtagtccattatcgactctctctaaattaccttcaggtctggggactctactgcttgttgccatacttggctctgggagtccccagagaggctggggcacctacacctcgagggggcaccgtctctaggggcattacacagctaaccctcaggggtcccaccaactattcatagcacaaatagtgtcccagctctatctcatctgttagaaaatctctccctcttgaggcctttaaaggccaagtcctttcttcccttccttcgggacattccctaatctcagttcatttcagcctccataaaagacaataagtgcctctaacttccaacaggaatttagttagaggggtagagtaacaaatagaaattaaaagcttctactttcctttctcttttcttttctttttttctttctttttttttttttttgaggcagagtctcactctgtcacccaggctggagtgcagtggcacgatcttggctcactgcaacttccgcctcccgggttcaagcgattctcctgcctcagcttcccgagtagctgggattacaggcgtgtgccaccatgcccagctaattttttgtattttcagtagagacagggtttcactatgttagccaggatggtctcaatctcctgatctcgtgatccacccacctcggcctcccaaagtgctgggattacaggcatgagccaccgtgcccagccgaaagcttctactttctaaaagacaccccagctcctaaaatttcaagaaggagggattagtgctaggttgaggggcgtggagggaaaaaacgaagacgacacagacaaatgaatattttagtaaattgcctcaccactatttaatatcatgagtgttggctaagcaccacgttttttgtgccaccaccggttgtaatttttttcatgttgtgccctctctgtaaagcctgtttaggggaatagagaaaagctaaaggtgttcggcaaaacagtgacagggacgctgtctccatcaccaggggcaagtcatgctgtgtcaatattctaccaaagagtattatttttgaatcagtagagaaaaatcccttgtctcaggcagtggttggacactttgtcagctataaatcacatgttcgttaagttagcacagaatattccactttaaatacagggtaatgaagacaaacagaatcccaggggttcaacctggaggagaaacaatgctgattttatggagcatatgagaaatacacaatcgcagcaaacttctgaacgcttggactgttggccaagaacttgcctttggtggtgagcaagtgaaaactgaccagaactctgcctagtgtggaagaggagagtaccacatcaacaaaccaggcactggaatgggcaggtggttttctattccaaacagcaaactctaagaatagcgatcttataaataattgagagaaaatattttcttaatctttctgactcactggagaactgcattgtgacactttttcttaatctttctgactcactggagaactgcattgtgacactttttcaggtaggaaatgtattcagttggtaggaggaactggaataactgcaggttaaacaaatacaaggtttatttttttctactgaaaacagtagatataggcagatcaagacttttctgaagggcccactgtatgacccctgtctcagtctccttctgtctttatgctgctaccctgggcatatgccctcatacttggctcctaccagatggctgctgcaccctcagctcccacacgcacattctagcaagaagcagcagccaacaggtcaagagcaataaggcagatgcgaacatttcttgaagcctcactcattcaccaagctggctgaaacagatgctggaaaatgtagttgtcacttgtgcatgttgtcatttctgatgcaaatggggttctcttactaagaaaggaaatttgagtttgggtaggcaagtggagtgtctgccagagtcaccaggcagggagcaaagtctcatagacaaatccatggaattgggaatcactgagcctcatttctgctttgactctgcagatttagcaaattccccagctgcaaaaggaaaattctttttctaattccaggagaatggatttctcgaggaataatttaaaggtgtcagttaatttattaacattttcttcaaataaaatattcccataagatgcaaccgttcttttatgtatataagtttaaagaggataaaaagttgaaaaatctttcttaattgtttactgagggagtaagactttcaaccaactgtactgtaaattagaaataaaataattataacaactaaccactacagtaatttacactgttaacactgcattttcaaacttattgggccattgtatgctctaaacttctgcttttatctgccttttaagtgaggaaaatgttattgtcgttatctagagctcacagattgagatctactgcaaataaacatgaatgaaaagttgggttccctgcgtaggggaattgcagaattcgtgaaatcttcaggagacgagacactgcagtctgacataacacagcctgacccaaggggtcgcacagaagactgtgagctctgagccctgcatctcttcttttcatgacccaatgcgggcatcccaactacccagacaaaggaggcttatttgaaataattggcagtcacagccacgttttcagtgttatgtttcaaactgtttgtctctgatcctgtttgaactttgatgacaatatctgtgtctctaatgagaccgaactgctgtcagcatctgaaaacgctgcccagctcgtgtctgaggttggcacgttggacggatgctgcgctcgttcctcagggggaaccatgcggctccggctttgctctctcaggcagcttctgcagtgagtgcgcaggtcgtgagggctgcccggtgaatcctgggactgggccttgggagagttttcagaatccacctttggtgaggtgatgtgatgggaaggagcccactgctgtgcttttacagacccagtgtcaatcaaggattccttttttttctaaataattccatgaacattaaggaaagaagccacattcattcatttcaactttctgaacacctgctatgcctccatcactgtgcgaggatttgaggagacagggttagatggcattggtcactctctttagcttctctccatatgcacaatagtgattactggaccctcgggcaagtttcagggagtcagatgaaataacttcccaaatacaaagttaatgcaactatcaaaaagcaattagtatgcacctttgaatcaataaaaccacacagagtctattcccctgtaatcaaaacaatgtttatgtctcgtctttaaatagtgtacatgtcaggcacttgacaaatatattttaaaagtgaattttgttttttttgtaccttaacaaaaagttagccaggtgaaatcctttttcattcttaacagtgtatttcaaaatattcacgtttccgagaataccgaggacatgaagctcagaaaaacactaagcccatgaaacaaagaatccttagagcgaaaatacaaatcagcaaaagatggattttacaaatggaaacactaagagagcttaggtaactacaagtgctatgaggaatgcctgggccctccagaaagcccagcacagcttccctttacttacatataatgcctagcgaaggaataaaattcagggatgctgtaattagtggatgctaaaacccacactcacaagaaaaatacaagagcggaaatgctaaaattctcaagacatgcaggcagtggtttcctgctgaaagaggttttgcagttcttcctttccttgccttcactaatgaggaaatgtcctctatgacagcaagtctttctctctccacccaaaggctgttctgtagctgaccggcatattgcaggtcctgtgaaaggtggagatcgtttcatctgagtcactcttgcttggaaatacacctgttccctaatgtgcagcccctcggtattgtgctggctttctagatctgagtttacatttccctgtgcagaataccttgacaaatggcagctttctgtgactgatgacagtgcctggtttgtatgagatgtgacttccttctctcaggactgtcatccatctctaatgtcatactgctcatcaaagcaaaccatacagactttctttggaaaacactgaaattggcatgcatttacttttaaacatttattttctctttttaaaaactttacgtgtgtaaatttaggaggtaaaagtgttatattaaaaaatacaatggatttgaaaaatacatcaatttgtcatcatgctctagcctcattttcatgttctgaaggcacccttaatagaaactctgattttgtttgtatctggggagaaatccaggggaaagaagagaaattccatgaatcctcctacaggcaacttttatcagaggcgtgtaacatacagtgaatgcagttaatttgggcaactggtgcatgatttatagctttgaggatctaatctaatctgggtcattcctcttattagaggtgtgaccctgggcaaaccacacgcatagccttagcttccattttcctccatctgtacaagggggatactaacacctccttggcagagctgtgggaatttcacaagatgcacgtgccaacatctgtgcgcgtggaatgcactaaatatcagtaaatgaccagtgatgatgacaacgaagaatgatgatatttatcaataacaatcactttcaaggaaaatattttcattgtgttttgaattatttagactctccataccaaaaaaggccacaagaaattgcttatcttttatctaagtttttctaagccaccagagcctaaaatcaaaatgatttatagattaatttcaggaagagaaaaagagaaatgtggttggggagagggagaaagagggagggaggatcttttcttcctttctcctgagcttccatcttgtcccacagaggtgggtacctcaggcctttctcccatgcaatgctgggaagggaggaaccctctacacctcccattattttcaggaggacagcggctgctgtgactgatctcaccttcacattcattggtgaccactagaggtgggagtcgctgggatatttttagcataggctggatgacacctccatggcaggtacgtcagccacctctgctttagtcaccagcatagggctgtgcttagcagagagcctagcatagagaggatgcttattaaatattgggtaaaagaataaaatgataaataagggccactataaaatgaatgttacacaaaaacgtgttttccccaacaactcacccagatgaagacttacagagcagcccagctactcctccccatatagaattcctcatctggtatgttgcaatgacttttatttttaaactgttcttgaatcttttctgacacaccgtttgcatctcagaagtgtatataggtcttttaccttatgtggacttacggagatggagcaagagaaacctgttcttaatgatgcccgcttctatttttccttcccctgagtgctagctgccaatagatcctgccttactacttgaattcccactgattccaatacaaatccagcaggataagaaatgtcttaatattatagcacaagctacctatatttttgacagctttagttgtgtttccaactttgaaaattgataagcatgaaccaggaaagacagtttgaaattctaattcaaaatctagggaaatgcatatctatttttctttgctgctaagagctgatcaaaagggtagatcaatcatgtaacagcgattacaatctctgcttctacataaaaaatgaatactttagagaaagactggggtttgatgcaactctacgctcataatttaccctgcatactgtccaaaactataatttttaaattatatatttcctagaataatgtgtaagaaatggctttttaagccaaaatatgttaactattctattaaagaggactattgtatgcagacataaaaatataacatgaacatttatattattgtaaataattatgccaatataaactaaataatgtgatttcccccttattttaattaaataaaatataaacgtctaactttttgctttgctagcttatatcaaacattaattttaatattaaaatagtatgttaactttcatcagtaactgaagagcatcctgtaacccttttatcctgcaatttcacttactctttattctgaagtagtcttagacatgtgcacaaatttatctacaaggatgtccatcatattgttgttaataataatgaaaaaataaaattatctgaacaaataagagattgaactacggtttgctgaggcgctggaacatagtgttgtgccaaaaataatgctgttgaaaaatatttattaatatggaaaatgtggctaccttatttcaagtataaaatactcgctgtgatcccaatatttctgtgaaaaacaggcatgcataactcgaggagaaaagatcaaaaaagatataacccaatggttttatgaaggcggtgaaattacagagaatctgttcattggaatgcaagctttctgagggtaagagttcgggtcagtcttgttcagcacctggaacaggcctggttcaaaaataagggccccaaagatgcatgctgaatgacttaattttcttatttttcatacttatgatttccaaatttctgttgtaattgacaaaatgcatttttaaggtcctaatcaagctaagaagcagctttagggccaaggcgttttctaatgccatttcccacacacattccattctctactgatacttttagatagtttcataaggaagctaactgtaaataaactctgctgtatctttatgtatttcatcattgtgttcagttacttgctgacactaaccttccattagttgtccttggctggaattgtgtgagtgaccttgctcctaacataggaacgaggccatttattttatcccaaagttaaagcactattattggttttaccttaccctgattttttttttttttgcatgctacagtatattgtgtttggcacaatgcttcacatatgtgaatatttatattttaaaaatccggactctttttatttttattatggaatatctggctgaatgggatcagatttcctcatgaaagtataggggtgactcagagaaactgtgaggcagtcatttggaaattccctggaagttctaataccaggaagtatgtcctcaactacttgttttatagaacatccaaatctgagggtaaaactttcctggttaaaaataaggcaagaacaaataaataaaatagtaaggaataaatgcaagatatctattggatgacatagtaaatatagttaataacaatttgcaaattgcaaacagagtacattttaagtgttctcaccacaaaaaaataagcacatgaggtgatacatatgttcattagcttgaggtggccatcccacaatgtttatatatttcaaaacatcatgttagtataccataaatatatttggttttcatttatcaactaaaaaaattaattaaaaacaacaaaaaataaaaccaaaaacgtctcccggaggcagggatttagtccctgtggccaattcccatcgctctgtaactgagtgagtctgcataggaagtatgtttgttgaagcatatagttgtagagagtgacttttcattttacagtgcttagttttaaaaaattatgcacataatctatgactaaattttctctgttaaagtttcaggcaacgcagatgtgaagagaataaatatgaaagtctccctcctggccctggcttgcagccctctgctccctttagaggtaaaccctggaaagtgctttgcatatgtctttccaggactgatcaggtccatgcttacgtgcatatgtaactacacatgacacacatatacagtgttgcttggcttatcataaaaggcgttctagagtctgtattgtcttttgacttggtgttttttcaggtaataacatgacttccaagactttttccccctcattacactcaaatattattatttttaaaagtaccataatatggaattgttgtattttaattaatcaccttccccctgactcatagtcattgtattcctttcagtttctctcaataacaaactcttctctgtgttttgtacccttctccatacaacttttgacgcgagtgtaaagtacttctctattgcagaatactagaagaattgcaagctttaggatttaaatttttttgtttttttttgagatggagtcccactgtcacccaggctggagtgcagtggcacgatctcagccctttgcaacccccactgcccaagttcaagcgattttcctgcctcagcctcctgagtagctgggattacaggcatgtgccacctcacctggctaatttttgtatttttagtagagatggagtttaactatattggccaggctgatctcgagctcctgaccttaggtgatccacctgcctcagtctcccaaagtgctgggattacaggcgtgagccaccatacctggcctagttttaaatattttgaactttgatctttactgataaaatgcctcacccccaaaatgggatttactaatgtatacttccaccaagactggaaggaattagctgtccctagctgaataagtccctggtgcactttgttttatcactaagcacttttaatcctatgcttgaaagaaaagcattggtttaagatgcccgccaagtgtctttaagagaaaagttaccactggtgagcttttggatttacctccatgtctgaatgagccctctttttctgcccatgtgtcttatgtaccataattcaaattatggcagaacttggaagtagaaagtagaggtctatctaactactattggcttatttaaatgcacataataattcagttaaaataaaaatcccaggttaagtgctaagccacgtaggatgctggaatgagaggtatacattagcatgattgtgaagtatatgataaaactattcatggccccacaaaccaaactttaagaatcagaaaatgtgttgataaggttaaaataacaagatattctcttagttaattgcttttagtcatggttgtagcttaagcctttttctgattttgaaatgcagtttctcttggatgatgaggccataagtcagagatctgcttcaataaaagaataaaattatccataataacctctggatcatgaaggatagaaacataattacatttcctttaaaaatagcttgctggaggcacaaataaacagcagccataataatgtcgtatattaatataaccatccagaaaagaaccagaaagacaaaacctattattataatttaccatctattaaacatattagctataaaattaaaggctgatcttaaaaaacattaaaggttgttttttttaaaagagccaaagtaagcaaaaaaaagagatttgtttaataaggttgcttttctcaagaaattaatgcagttatgtaacaattcaaatgcatttgcaaactataccaaacttcaatgttctctaactattcagagtacacaagcaatcagcatcacatatatttgatttaatcattgaaaatacagctatttattttaaatcataaaatgaaaaaagttggataatcatatactgaaaagatagaattctgtgataattgctcattaaaaatagaaattaggccaggcatggtggctcacacctataatcccatcacttggggaggccaagacaggtagatcacctgaggtcaggagtttgagaccagcctggccaacatggtgacaccccgtctgtactaaaaaaaatacaaaaaattaaccagcgtggtggtggacatctgtaatcccagctacttgggtggctgaggcaggataattgcttgaacccaggaggtggaaattgcagagagccgagatagcatcactgcactccagcctgggtgacagagtgagactctgtcaaaaaacaaaaaaaaaaaagaaagaaagaagaaagaaaagaaagaaagaaagaaaaataaagcaactctttacccaaaaaaacaaaaataaacagtatcctaaaaggcataacattacaatatttccagttaaaatcaggaactaggcagaaacatgttccacggctgttaaaagccttgaggattttagtacatatgattaaggtaaaatctaatttcataagcattgaaaaagaaaagagccaattatctcctattgctgtgatactattttgtacctggcaaaacaagtgattctagctaaagagaaactgagagaattaaaaaaagaatttgcaggtataccagataagtgtttttgaataggttttctctattttggcaattaagtaagagtggaaacgtgaaaaagtaagcattaacatgatctgaaaagcaatacattttgtacaatatccatatatgaggatcactataaaatcttatttaaagacctaaaagcaaagcaagtgtgtgattcaagcccacctctccgcacttcacctcgtccctccgccttatttccccatcttggtaaatgacacctccatctaccaatttattgagtcagaagcccaggagccgtacctggcgcctcgctttccccatccccatatccaagccctcagcatgtcctgtggactttgccgctaaggacctgctgaatagaacgatcgcccatcacctccaatgccaagcctccactcaagcggatctggtctctgtcctggaccccgggattccttcctgactgggacccgctgacactcttgctcttctgcattgcgctttccacccagcacccagggaactccacacctcacatctgattctatcactccccagtggagagcccgattgctgctgcctgcagttacagcacaattccagtgcctcgcctcagcctacacgacctgggctctgctccctcccagcagcgtccccgtccaccctccccactttccgtgtgtggcagtaggcccatcttcctgtcccttggttagaccaagctcacgtggctgccagagcttcccatcaacgcagcagctagttcagcaccaactctccagtcgctttctatccgttactcggctttgtttttgtttgtttgtttgtttgtttttaattattatactttaagttctagggtacatgtgcacaacgtgcaggtttgttacatatgtatacatgtgccatgttggtgtgctgcacccattaactcgccatttacattaggtatatctcctaatgctatccctcccccccccccaccccacgacaggccccggtgtgtgatgttccccttcctgtgtccatgtgttctcattgttcaattcccacctatgagtgagaacatgcggtgtttggttttctgtccttgcaatagtttgctgagaatgatggtttccagcttcatccatgtccctacaaaggacatgaactcatcattttttatggctgcatagtattccatggtgtatatgtgccacattttcttaatccagtctatcattgatggacattcgggttggttccaagtctttgctattgtgaatagtgctgcaataaacatacgtgtgcatgtgtctttatagcagcatgatttatagtcctttgagtatatacccagtaatgggatagctgggtcaaatggtatttctagttctagatccctgaggaatcgccacaatgacttccacaatggttgaaccagtttacagtcccaccaacagtgtaaaagtgttcctatttctccacatcctctccagcacctgttgtttcctgactttttaatgatcgccattctaacaggtgtgagatggtatctcattgcggttttgatttgcatttctctgatggctttgtttttctcatgaggatgcacaactctctgagcttctatctgttcacaggtgaaacaccctcatgcacactggagcatcagcacggtgagggcagggcgtccacgtgtctttgtgccctgcttgaccccgtgctgggaccttctacgagagccacggtgacacgtacagcagatttccgggacacggcagttgtgaaaataaaagaacgaaagaatgaacaaaaggaaagtgaacacttccccattttatagattggagagttgaggtttggcgagtgatgtgaattatccatgattacgtagctgaggtttggccaagtgcagactccagatggttctgtctagttctgcctcccagggctttcccctgtgcaggctgcctcgaccctgcctgactgccgcctgtgtctgaatctctcagagccgtctgtcttaaacaggaagagacggcctttatatactgttttcaaggcaacccactcccatttaatgttagtctagatggttgcaggtgtattttgttatgctggcttctggtttactctgcatagtcggggagcatgagaggggtgatatggttagcaaatgcctttgaattgttacataactacattgattccttgaaaaaagccatcttattaaaacaaaacaaggaatattatgccttgttgaagctgacctatcaaaatgtaaaagaaataaagtaatgaatggtgtcttggaaaaaacagtgttttgttattgtgtcagttatacctaaagacaaagaatgtcttgaaagcatatttttaaatcaagaaatgttaaacactgaaaactattacaaaatcttctacaaaagtagcaatatagtattcatcaataactaggatacttttaagtttctccttgatattttctcacccctttccatcaacaaacattgtgcttaggaccagtggcctttcctctcctgccaggctttcaaagtacggaaaagcaaacagaacagaacactcgaatttcagctcataggctggaagcaaatagactgtggtcagacaagggctgacaggttcggagtgattttcctcatttgtgatagcaactaagagatctgggaagtattgtctgtggtaggcataagcaggatgaaaatggcatggtagctatgtagacacagcactgaggtggaggagaaggatgaagaacagaagaggggatggggagaaaaaagtgaagaaaaagagaaaggaaggaaggatgatacaggaagggaaaggaagaaaagaggaaggaagttgctgagcaaaagcttggatttaaaaactagtaaaattttattagcatcatgcaaggacttagtaatgtaatatcattgaaacaaggtcaaacatggttaaataataaaactaggggagattgtagagttaaggaaattgagaaattaaataatagccctttacagaacaatacattagagacagcaatcaacatatgagagtgaaagcatgggaaaggagattaaagaaatggaagctagacaacaatgatccaaataaataatatttctcaaagaagaaactattatagcaccaaaccttctttttataagaattttgtaccaaggataattctctgaaataacagaaagtgctccaggaaaagtgggtacagaataattgacaccaaaatactttctttcaaaattacttgacatcaagcatgaagaaagaattttcagacattcagacaagaaaaaagaaaggcatctacaagtggtgaaaaatttaggctaaccataaatctctagagaattcagggactatagcacgaattatttttgagaaaaaatgccaacaacttctgacgatgaaatccggtgaaatatgttattcatccaagcaaaaatgccaggaatggagaagcagtggtgagagaatgggtgtgaggattgattctttctttaatttgaaactaaaactaaattattgtgggaatttctgttacagaatttaaggtgttataatcctggcaaaataaacataacaatgtaaccaaagcattaggaggtaggggaagaaaaaagaagaagtataaaattgttaatgttgtttatctttcatatgattgagtttatcaataatatctaaatttgaaacagaggtacaaaaacttaatgagtataattccttaattattttcaaaatctttgtttcattattttaatatgatctcttagacactaatatttcatttgataaagtaacatttatctgtttttctttatttggtttctttaatagcacttttcccttgcattaatgcaaaattatatttggtatcttttgaaaattaaactgatgaaaaagaaacaacagtcatattgattgggaaagaaggaaaaggtgttctattcaaagataatatgattgtctgcatagaaaatctcaaagaatctaccaaaaactactggaactaatgagtgggtctagaaggttgcaatatacaaggtcaatatacaaaagtccattgtatttctatacaccagcaatgaataataggaactttatttgaaaaagtattatgtaaaacaacattgaaaacaaaattcttagtaaaatctaacaaaatatgtaaagatttttatgcagaatactataaaacactgataaaagaaattaaataagatctgtatgagtagaaagatgtactatgttcatggatcagaagactcaatattgttaagatgccaattcttcctaaactgacctgtagactcaatgtaattccagtgaaaattccagcagcattctttttgtaaatatcggcaagttgattctaaaatttatatgaaaaagtagaagactagaattgtccaaacaaattcttaaaagactaacaacatggagaacccacactacataattttgagacttaccataggactgtgataataaaatactgtggtatagctgaaaggatatgaacacaggccaaaagaacaggatagagagtccaaaaaaggcccacacatctatgccaattgattattgacaaagacaagaaaggatagttttttcaacacataattctggagcttgtggttatctataaatcaaaacacaaacatctcagcttatacacaaatgaactcaagtggatcatagaaatacatgtacatcttaaaaatataaaacttaaagaagaaaatacagaaaaaaatttcacgaccttagattagaaaaatatttattagaagcagtatctaaagcacaatccataaaagaaaaaaattgataaactgaacttttccaaaattaaaaacttctctactgtggaagatactgctaagagaatagaaaggcaagccacagacagggaaaaatttttgcaaaatacttatcaggagaagaacttatatttaaaccataaaaagaacttttaaatgcattaataaaaactcaattcaatttttaaaatggtatagagatttgaatagattttttcacaaaagaatatatattattgacaaacaaagcacagaaaaaagatgcttaagtcattaggaaaatatgaattaaaaccacaatgaggtaccactacattattttaaaacctgacagtatcaatgccggtggggatgaggtgaaactagaattctcataacactgcttgtgggaatgcaaaatggtgcagccactttgggaaacaatttgccagttccttatggtgttaaacacaatcccactgctcgatttttatccaagagaaatgaaaacctacatccacacaaagtcctgtgtacaaatgttcaaagcagctttatttataatagctgaaactagaaacaactcaaatgtcctttgactggtgaatacacaaacaaaatgtggtacatttgtataatgaaatagtattcatcaacaacaacaaaaaattaacaaattaaattatccgggtgtggtggcatgtgcctgtagtcccagctactcaggctgaagtgggaggtcacttgagcccagaagttcaaggctgcagtgagctatgatcatgccactgtatgccagcctggatgacagagcaagaccgtatatctaaaaataatttttttaactaacaaatgatcattacacacaatatcgtggaggactctcaaaagcattttgctaagcgaaagatatcagtcacgtaagtccacatactgtatgatgttatccataagactttctggaaaaagcaaaaccccagagacagaagtccgatcagttttcatcaggaggtgggggaggaagaaggttcaaggtaccttccaaagggaacttcacggggtggaggtaatattctgtatctggattgtggtgaagtttacatgactgtatttgtcaaaactcatagagctatatatctaaaatggttgaattttattgtacataaattatacctcaataaacctgactataaaattaaattggcatgtttatagatcctatatatgggaattgttcccatttatcatttctatctggatattcttatagacataaatattaatctttaaatctttgttaatacaaatgttaacatgtatcagttaacattcctgatgtttatagtagggtgattgggactttgagtgacattttgaattcttcttcatgcatttctgtatttcttgatttttaaaataagcatgtgctgttttttaaaataaaaaagttttatttttgctaagggctcaaaataaaggctccaaaaaataaaggattagtaagatctgaacaaaagaaatccggaatggcaatgagggcccagcagagctgagtagaggtgagaatatgatttccatcaacttggcctttctgggtttcaggactggatctgagcaggcagttgaccactgacctatcatctagactatggtttcctcagtaaaggaccactttcctacaatgatctctcaactgcctttagttcttgactcctaagaggtttccaacacacagacttatatggagtcggtgtattcccggaatgctcagacagtagggagtttctttagatagttctcgtattgtattggcatactcctctttcagttcttgggagaatttactacatactttatgcaatgattttagtaatcaagttacagtcatactgctgatttccctacagaaagtcaggcagccgaagtggtggcacggcataaattgatacatgaaatccaccatctgttctcaatgtacgcagcggctcctccacacctgcctggacttatcttgagaaggagagcaacaagaagaaaaaaaaatcaaaatgtttaattaatgttgctgggaaagaaggtgcaatccagcaaaactgaagttacagatactcataagctcacaggcctcttcttcaaagctgttaaggcgtaagctagaagtaagtggtctttgtagccctctgatggctcgttggggatgggaaagttagcaaatcctcttatgtgaactgcagagcccaagggcgaggaaaagcccgctcttgtgctttcacatttctgcccttgaaatacgacatagcacccccgggcacctgctgtcttttcattttctcacactgctgaataaataagcattttagggaaagccaagaacataatgaaggcttaactcagagtgcagaagtgtctagggatgcccactacagctcagaggccaaatgtcaccaagatcacttccatacacatagactccattcactttttgaggtcacctgcattgccaatgacagctcaaaagcgtaacatttcacagtttctttctcatgatctccttaggcctactaactacacatataaactcaaatgataaaaggatgaactagctatttttataatctctcattttactcttcaaagtgtttaggcaagaataaaatatataacaatgcataaatgaacctgaacacttggctctttaagattcctctagaatatccttggcatctctgtagagaaaaaaggtagcatgaaaagaagccaaatcgtgcttcacacacgcccactccacttcccatgacactctgggcacatctttttagaaaatacgaattcggtcttattcatttaagcttccataaagtaagtaatgcatgatttttaaactttctgttttgatgcgtaggtgccaacaggcaactttctcaggttgtcaccctatttaaaagttccgagaaaatccacagcattagacatgtctcttgtaagttactgcgccccttagtaaaccacatgacaagctggtaaatacaagtattcacaagcaaatacgatgtgttacaggtgaacatagcaagcccctgggcgattggggaaaacgatggactgactgagaaagcatttaggcatagtgacttgttcccggactgtccagagaggtttaaattccttgctagaaactcttatgaaaggaaatgtgaggtgggcggcagaaaggctaaggtgttctaggctgcaataagaaaagtatacaatccacccagtgcggtggctcacgcctgtaatcccagcacttcaggaggccgaggtgggcagattacaaggtcaggagattgaggccagcctggctaacacagtgaaaccccatctctactaaaaatacaaaaaattagccgggcatggtggcggttgcctttagtcccagttactcaggaggctgaggcaggaaaattgcttgaacctgggaggcggaggttgcagtgagccaagatcataccactgcactccagcctgggcaacagagcaagactctgtctcaaaaaaaaaaaaaaaaaaagaaaagaaaaaaaaaagaaaagaaaacaacgtggcctgtggcctggtctggttctgctctgctatccacggctcaggtcaatctggaacatgggattccgtgtgggaaagtacatgctaaaaggaaattagaagatctgtaccaagaaaagaatagcagcaccatgagagaaccgggacttgggagacgtaaaggatgacagaagaggtctgatcatttagcctggaacagactcagtgcaagaaaggacaatatcacccttttcaaatatttgaaaagctgggctttgaagcgatttgtttggtttgccccaaagggtataacttagaccaaatggtcagaaactacagagaaacagatttcagctcagtaaagggaaggaccttccagcgggcagcgatagaatggccaaagaggaaggaccttccagccagtttgaagacagaataggctgccttgagaggtgaggctggctttgcagcacacttgagttgcacaaacagcctgggcagctgtctgcggggaagccggaaaaggcatttagtaggtagaagtaaaagagggtccacgagcccatataataaacttggctgttgagtgagaatctggcacccacctacataggcgctcacagttcaattgatgatggaaataatatcacatttctttctgttagtagaaccctacatgggccgggtagaagagaaggtgctctgtgtatggaggaagtctttgagcaagcgaaattacagtgtttgaagaaacacacttccctcttttatacagttccgaaactgttataaagatttggttgtttgaagggttgaaaaactactgcttcgttaagaaccacgctgtggcttcaggaaaaggaaaaatcaaaacttgcgggcatcgcagaccgtggcatttattattcaatggtttgacactggaaatgcatataccatgcagcctgcagatttatagactgcagattttgtggtatgttaaaaatatttttttgcaagtgatttgaagtatgctatttatgatatttcagcaaaatgagctactgtaacctaagttaaacaagttattcaatagtttcaagcagcaaactataacctagcaagactttggaagctgaggggtggtagcaccctcctactataggaaactattcttcaattatttgtaattattattattagaatcatttcatatcttctggagagttattaagaagatggggttgctgatcttcttaataacaaattatccaatttattatctgtaattttgttcctcaaaactttcccccttaagttgttgttggatagaaaaggttgcttttttgtttgactttttactaaattatcatggattctcacatagtatatatatatgtgtgtgtgtgtgtgtgtgtgtgtgtgtgtgtacattgaactcatatcttttcattataattattggaagcataaactgtatgaaacctgacattctatattattattattattattattttgctttctggcattcaatatattgcctgtcccaatttatttattctgagttttcattgcatttatcatactctgtaaaatgctcgtgctagtaatggctcccaaagatacatctatatacaaatccccagaatctgtgaatgttaccttatttgaaaacatggtctttggagaatgtgattatcctggattatctggatgggctctaaatgcaatcacatgtgtccctagaaacgaggggtggtggggggttggagagagacacacagaggagaaggcaatgtggagatggaggcagagacttgagtgatggggccacaagccaaggcatgctggtagccaccaaaatttggaagaagcaaagattaaatttcccctagggcctccagagggagtgtaaccccacctccatcttggttttgaatttctggactccagaaatgtgtgagaataatttcttttactttttcatccagttcatggtaacttgttacagcaaccatatgaaacaaatagtgttctttcttctagagtttgttttcctaccttctcccaactctaaattgctcacacaatgtttgggaatttccttccccatctctaggttctaaaatcctgccagtgcttccaggcttagcttcacatggtgtggccccagcagcctgctgtgtccaccccaacccgcatgactgggagtcactcaactcctcctctgaacactcaacacagggaaagccccggagtcctcattgtctcatctgaaaaccctctcatgattgtttgcaaactgcatgagataaactgaaaatatttagcattgtattcagggcagagtaggtgttcggcccacctgtcgccttccaaattgccagtgcatagctgtatctctttcccagcacacactccagcaggcgactgctgtcattatgccttgtgaggcgatcggggctgagtgagcttcctaagcttccctctttttcacctaacacctttgctttctatcatcccttttctgttttacttttatcttagaggaagagggttttttcttccattccaaggttaaactttccaactaggttttaatgttcatcattggcgcctcctctggagcctctagccattttctccttctggaaaacatctcaatcaatccctctctgtttgcactttcttctaaactgaaaaacagaatgaggtgcaacaatgttaaaatagagaaagaaaatgcaattgctccctttctctcccaccctacttgattttttccacagtcatttttttttttaagactgcttccgatgcctcaccattcacgcattctaaatcatttctaacctggtctccgtgttcacctctgctattttttttcaaattcattagtgatttcatagttatgaagtccagttactgcttctgggacatgatgctgttgcacctaactctgctgtggcctgcatattggatatctctgcttcgattcaaaatgtttaaaatcggtatcattccccgatctccaatttatcttttcatgttcctctcagtctctcacttgggtaccaagtgttcatctttgctttttccccttctttccacccaatctgtgcttctgtcctcctcctccgcctgacagttttacgccctgaacatctatataatttattgttactgttactccattggatataatgaggctctcatcactcacttgccacctgagctattgcagtttcctcctgacactcattccacctcctgccttccttcattccactcactcccccacaattctgccagaataattttttttcttttttttctttgagacacagtttcactctgtcccccaggctggagtgcaatggtgcgatctcaactcactgcaacctctgcctcccaagttcaagcaattttcctgcctcagcctcccaagtagctgggattacaggcatgtgccaccatgcccagctaatttttgtatttttagtagagatagggttttgccatgttggccaggctggtcttgaactcctgacctcaagtgatccacccacctcagcctcccaaagttctgggattacaggtgtgagccaccgcacctggaccagattaatttttaagtgtatttattaatatatcacttttttgtataaaatccttttgtggctacccattttctattgaatcaagtatattccattcaatttacttcagttgtcattgcaaagctctttacagtacagaagtcaccgtggctaacatctatggaattctggtatgttctggggactctgaagcacttacagatgttatctcctcttatcctgacaagaagactgtgtggcaggctcagtactgtttgagtgtcacagtgagaatccagaggtttagccaggattagaactgtgtgtctctatctctacagcctaatgagagagcccacaagagaatctttaaggccgcctccactcacacccgcttccggactcccccacagtctcaccctgacggcttcatgacgtgatcacgctccactcagtggtctcacctctgcctgctgaggccagatgctttctggtgccctgctcagaccccttctaacagcacagtgtgtgtttctcttgctccttcacagctgtatgcactcaggagcatggggacaccctcctttcatcttggtgtcctcttcaacatcctagcacatgggcctgaacgtaggagtggctccatatgtgtggaattccaatgcctaggttttctgccttgctagaaaacaggctttttaagggtaggacaaaactataagaaacatttgtatgttttatagtattgaacatgttgcattatacagagctgatagtaaatattgaatgaatgaatgaacgaatgaatgaaataaaagaaagggaatcacttaagctgtgtgggtttcttcagctataaaataaaggcgtcaggacagactgcctctgagattcctttcagatctaaaatgttatgagtttcagattctgcttattctttgttttttaattctgcttattctttgttttttaattctgcttattctaatacttttttattttgtgtcagtaaacaaaaaagtaagtggactttagcatctgtgaaattaaacccaagaagccatcataatgaaatcacctttgcaaaaatagtaacagtgagaaaattattgcagtgaaagagaacgtatctaaacaatccccactttgcctttaacctccaaaccgcctttagtcattcctgggcatgacagcctttcccaaacctacacggcctttgcaaaactaatacaagaacacaggttaggagaatgagggacctgaattatgttaaggaacagacgtacacaattatcagccattatcctagaggaaacaagatttcaacgtgctcaattatttctgcagatagcaacactattgtgtactagaacctaagactggccttttgaaatgtcttttcaggtttttgcacttctgaccaccaatggctccactcggacccaccaaccagctatgaggcctcactcacaaggagaccccctggcctgtcaaactatccttgaaaaaccctagtctccaaattttggcagagattgatttgagcaataactctatctcctacgtgctgtggccagtcttgtgccaattaaactattgcaatgccatagtctcagtgaattggttttgtctgtgtagtgggcaagaagagcccatcaggtggttacaataacttttttgtttttttgagacagagtcttgctctgtctccaggttgggagtgcagtggcgcgatcttggctcactgcaacatccacctcccgggttcaagggattcccctgcctcagcctcgtgaacagctagtgttataggcacacaccaccacacccagctaattttttgtattttagtagagaaggggtttcaccatcttggccaggatggtctcgatctcctgacctcgtgatccgcctgcctcggtctcccaaagtatttttccattttatataaaatgttagattgggtgctaagttaatttcttctcctcctgcttatactagaaatctttgagcatcaaagtaaactcaagaatttcaattgctttaagaaactaacctgagtgtacagaagaataaagaggttaaagaaaatatccagctatgaaggaacttgggagttgttaatgttctagaattgcatcatgtatctttaaggggcaaaggagagacataatttaaaacatccactagagagctctgcaacatttcctttttgcaaacattaatccatgttaattattccccagagcaatgtcagcattcccatagattcgattctactgataaggactttgattatgcacccatgttcacagcaaccttattcacaatagccaaaaggtggaaacaactcaagggtccatggacaagtgaatgggtaaacaaaacgtggtgcatacatatcgcagaatattatttaaccttaagaaggaaggaaatcctggcacatgtcgcaacatggatgaattttgtggacagtgtgcatggtgaagtaagccagacacagaaggaaaaatcctgtatgattccaatcataatgaagtacctggagaagtcaaactcgcagagacagaaagtagaatggtggttgccagaggctagggtgaggtggccagttattgtttaatgggtacacagtattagttttggaagatgaaaaaattttgcagatggatggcagagacggtagcccaagaatgtgaatacacttaaggccttatggctgtacacttaaaaatggctaaaatggtcaattttatgttatttagaaaatgagaatggggagaaaccttgagcaagtgaacaagaaaattatagccttgaaaaaaacaagaatagggaactacataatatattcttctgtgatttgaacactccgattactattgagagctagtgaaattactggtcttgaattttctaaggatgctagctgtggaggagaaggaagaaagagataatcaggcacagagtaggggaaggcactggggttgctatgctgtggaatgaggaggaagaaagaagagacagaaaggccttatcatactaggaaatggattgtcttctgctgccctgtattccagagtgatgtgtggtgagagggcttgacatgggatcataacatctgcgagtgtgagcctggggtaggcgggatgcatgggctgcaatacaccagacagcaccactgccgcgctggagcaaaggctctgggagctgcttcctgggctggagcccacccactagcagggctggagcttgtcaaacttcattattctccaagatactgggagacccgggcccttcagcacctcactcatggatgttaaatctggaatagatagcgtagaggtgaagggaattttcttccctccagcttctgaaggtttgataatttgagtccataaaacaaactgacaatagacaggttaacagccagaagggcatgtgaatttattaacatgcccatggacatgggagtcccacaaacatgagactcaaaaaagggtcagctgactgaagtttttagactatcttccattccaggcgatggaaggaacaggggctaggggttccccgggggaggaggcaacaaggttatgggagagtgaaggcaggtaagcctggtgagcaaacggtgtcttgttatgtggataaaactctcctataaccctggagctgccctcaggaagagcagatgggaatggggtaaaagtctctatcagaccttcagcagcgtcagactttagcctttttttcccatgagttaacctttcctagatccggatgaggaagacaagggtgcctcggagcctgtctgcatggtctgtctacctcccgaatgcagattttccctacagatgcaaatctgcctcacaaaggacagcttttcagagctattcctgtgttctccagcccctctgaataccgatctcgaaatatgccaaagaagcatattttagggtaaaatattccggtttctttcaatagaaccacagaaatatgcatgttttaaaagagcaaagacattatgggaacatattgaaggaaaaatatgaaaaagacaagagcaaaaggatcaaacacagaagaaaatgttggcaggtgttggggaaaagtgggcgtgagactcaccaggtgcttcatggcccccagggaacttgcagaacatcaaaattagattttgactgattttccaacaaattggttggcttcagaagtaaaaaaaaaaataaacagagatagtcatttttattagtagtaatcatcaaaaataaaaatcgatttgaaaatttctgtgtaggttttcagttttacagacataatctccagttccttttaagaatggtctgaacccagagcccctctgtccataccaattacatcacatgttacactgaagacttgaccagccgtgtcacaagcacccagatgtcttacctcgcaaggcaccagtgcctccctgtaattgctgcactgtcagaatcaatatctctctggggtctgcttttgaggttcagccaatcagctccattgcgctgacacagctcagcttatgccaaagagagctgccacctcagtccccacaaaagaacaaaacacaccatcatcccagatgatgcaacccactccctcagcaaacatcactgtgacttgaaaatcacagactctcagagaatgaaggaggcctggagaccagctcctcggagcctagcactttcctgaagcacagacaggaggggcatgatcacacggggagccagtgactgagccggggatgcctcctgacaccccggctgggcccatgtccatgctgccatgtatggccaggcatcagtgttttaatgaccccttcatctgatcacatggctttgcacacttactttaattttagacttgaaaacatgtgatttactagttgtgtgcttctaagaatccatgacacagacaagaaagaagaatgaattaggacgataggcccaccgggggccaaaattctcattctcagcctacctctcttatgagtgacagggcaagccctgatgccactgaagcaacagcagtgaactaagtcagggccaaggtacagaggacttgttttggtgtcacagcacctcctgaactccttgtctgtatgtttgcgtaattccctaccatccaaacttctactctattgatccatcccaacacagaatccaagaagaccaggtaagtcttcccttgtcctcataaccgaagctcgacttaggttcagatctccagtgggaatgaataagccaaggaggtgagggcagtggaggaaagtggcagcggcgtgagcatccgttctgctgcagcagatgcagcggtcatggcgcccgggcgacacctggtgctgcatggcagtggcatcacccccgccaggatcccgggtgcaccgggcccagtgcccggctgccttcttgctcagagtcaggtctcagtgtctgtggtcctagacagtactttctgctgattggcccggacaggtcagctgagaatgaaggactagggttcttctctgagaactttgcctcaacaataagaaacttgaagaacagtgactttgtcacactgtaacattaacaatttctttttcagagaagtaaaatgtgggcaaattatagttttcctgaaagaatttaattttcaaataattctggccaatcccttcattgttttcttttgaaaatattattatcggaaaagtttggtcccaaattctcagcacagaatttcatttggattaaaattagccagagagaatgatcagtaaggaccaggaaaagggagtgtatgagagtgatggagtttgaaatctcattgagtagaaatcccattgaccacaattatccagctctgaacaaggatcaaatgctcataggccaaaaaaagctccggattaggccaaagaatctcacttaaccaacttgtatataacaaatactccagtggattccacagcaatttcattttggaatttgtcatgggaaataggtaggaaagacagactgaaatggattcatgcataaagaaatgcacttaaagaaaaggggtaatttttggcattgacgggttctgaattagatacaaatcctcagagaaaggatttagacatgttggccaggcgagatggctgacgcctgtaatgccagcactttgggaggccgaggcaggtggatcacctgagatcaggagttcaagaccagcctgaccaacatggtgaaaccccgtctctactaaaaatgcaaaaattagctgggtttgttggtgcacgcctgtaatcccagctacacgggaggctgaggcaggagaatcccctgaatccgggaggcagaggttgcagtgagccaagatcgcgccactgcactccaacctgggtgacaagagcaaagctctgtctcaaaataaataaataaacaaacagctagtaactgggttttgacatatggaaattccttacttcttatttcaattcactgctcttttctaaacacagaactactgtgtagtgtaacaggatgattggcagggggtgctctgtggcccctggtgtgtgcccctaacaaagagccatgtcctctgcagagagttcttggtggaggaggctccactgggaaaagccaagccactgggtggtgcgttgccctcaagtttcccagtgatgccagtgatacctgccctaaattacaaatgctgcttacacatggccaaaaaaaaaaaaaaaagcacatgtcagtgattggttgtattacaaagcacgtcagtgattggttgtattactgagctactggaaaagctgcagcatctgcagcaattgcggaggctcaggaaacagtaccccagatgacagcctcagaagcaagagcttctctctgctcacttctgccttccggttcctcagcccaattctcccctgaggccagatatagaaaccagaatccctcttcctccaggaccgtcacagtaaccacaacccctttgccccagagccagccttaaaacctaaaagtattactctaactttcgctccgcctttctgggtaagaactggcgataaagacactctctgacccaccttgtttgagtgtaggtatgagatccgattccagagagggccccaccccacaccagaaggaaggaaagctgaccagagaggccagcaagaatctggacagacaggccttgctgggtgtccccactcagtctattcgcattagaccacaccctttcgtccaatcctatgcctacacagctgcccatactttgttaaacctaagcataaaaatggacagtttcccctgtatctttgggtcttcaatctgaaggctcctatgtacacattaagaaaatttgtacatcttttctcaaatgaatctgccttttgtgagttgatttttcagcgaaccttcagagggtgaagggaaaatttctcctaggccctgacacaaccataactactgcagtctgaaacaggtatgctccacagcctacaacaggtatagaaagtcacggaacacagatggctaaggttcaaaccagcacgagagggcgttcaaaaagctaaggagttaggctgggtgcagtggctcacgcctgtaatcccagcactttgggaggccgaggcaggcagattacctgaggtcaggagttcaagaccagcctggccaacatggtgaaaccctgtctccactcaaaaaaaaaaatttagcaggatgtggtggcaggtgcctgtaatcccagctactagggaggctgagacacaagaatcatttgaacccaggaagcaaaggttgcagtgagccaagatcatgccactgcactctagcctgggcaacagagcaagaccccgtctcaaacaaacaaaaaagctcaggagttggatagctccacagcaggggctaacattccatctaagcaaagtgactataatccaaccactttttgacgtctaaataaacttgtgcctttaatgactgttttctgattgacatcccattactgcctgaaggcaaaacaagctgaaagggcaagattgtgtgatagccaaagaaactcattcacatattaagccattgacaattttaagacatattctaaatggatcattctagcaattaagtggaggggaaatgaacggtaggggacataagcagggaaactagaaagaaagtttgacagttgatgtcaaaaataagaaaggctcaaactagcaccatgtctgtaaggaagaaaagaaagggaaaatttcccaaacatatatttagaagttaaatcaatcacactctattcactggacgatgaaagactgggtgaggaaaataaaaacatcaagaatcattgctcgtgtttttggaggcagtgttgcttggggttagtcagtaacgggtggcaaaataagaacaaaataatgactaccaaaacgcaaatgaaactaactagcggctacgttgatttgcatctcagccttattgcttgtctttacctctgggaaaaaaattgaagaagtaatagaaataaaatgcagagtggtatggagagggcgtcagtttagcaggaggtaatacccaaatctttagaaaaagcagagaatgttatttggataccgtgagcttcactgtagaggccaaggcatggtgagatttaataaaggtgcacagagcataaatctaaaaggcgattatgctagtataacccacacgatattgtggatgacgtgtttaatggcaacatcctgatccactcttgcctaggggatgttaatggaactacacaaaacctatcatgctttggttcaatgagagatttttttttttaagctcatacttcaagcaaggaacctaaaatctcttccatgatcacagtgtgcagaggcaatactaattttcagagcagcctgatctggaacaaaggagacaggaatcagggcagcctctgacagagtgctcacaggagaaagagatggtgctgcccggtacagcccctcccagcattcacaggcaatggctggaggtaagaagcaccaggtccggtctagataacagcatttgggacacacagcggataatccaagctgggacaggcagaggctactccttagtcagatggttaaggtctcgaagaattggtgactgtcatcaggacccgttctctgtgtttaagtgtgcacagggatttggacatattttttattttagagtgtagattctgtcgttctcgaaaatctttttcattttgtgaagtagcgagtttatttttattttttttaagagacagggtctcactctttcacccagggtggaatgcggtggcgtgatcatggatccctgcagcctcctgggtttaagcgatcctcccccctcagcctccccagaggctgggaccctgacaggcatactcagcactgagtttaaacccacctaacaaccaactacgcaacatgcccaggcactcccagagccaagattgtctagttgagtcaagggcttgatatccagagttggaaaaataaagagctctccttaacaaattgtatctgaataagtagacttgtgtttgggggagccaagtgttacagtagagcccaacgagtattataccttcaggcttcgcacgttctttacagtcataagcactcagcaaatggttaccatactggacgccatggaagacttattagaagggggtaaagttggaaatatgaaaatgagttaggctgtggccacagcctggaggaaaacaggtaagggttgatctaagatagaggcaacggcactagaaaggaggagacagctgcacatggtggcacacatctgtagtctcaactactaaggaggctgaggaaggaagatctctgagcccaggagtttcagattgtcgtgtgctatgatcacacctgtgaatagccactgcactccagctcaggcaatatagtaagaacccatctctaaaaataaaaagaagaaggggaagaaaggagaagatagctaaaagaaatttagaggcagacaatcgttcataagtaaaaaggcagtgaagtacataggacaaataagttactatacttgagagtaaaatattaaattggctagatcctaacttgtgagaaataatagagctacccgttccatactgacacccagcagtgaaccacacagcctttaggttaacaacgggactttctccagtcaagtacaagtcccagttctcttatcaaagagaactcaacttggatttatatgaagatcaaagaagccagctctgtaagtcatacctaaaaacattccatgcataaaataatgaagactactaggttatagagatggttatttgcaaagtgatagaatcccatttctcattaattgtgaaataatttaggacaaaaccaagaacagatgaaaacaggttatatagagagagaaaaaaaattcaaaaaatatagcaaaggcagtgataccaagacaaatgtgaattacatacccaatatttttctatttgcaaaatgtgtgattagatgagttggaagaaactgcctacaatttactgaaatactttgtgtatttgtacgtatgagtgggagagagagagggagggagagggagacagggaaacagagagagagagagacagagagaattatatttcagaccaagaatctgattcagtcactaaaactacagactgcttttaatctacagcccaaggatagtccaaaaggcagtgcaattatcaagttgtctaaaacattgtttatggacagctatctctttctgtgtaaagactgacctcattttgcacatatctaacatttgcaatctcaattgcatgaaacaaggtagataaactaggttgcatttatttcttttcctaaagaattagcaccagtattttgttagtcagttttaaattatgatgccatttacaaaattcaatttatatctatcttttcggaatacatatactgtgtagactatgtttccaaatttgatttttctccttgccttacccaaaatgttgaagaagaattttttttttttaattgagatggagtttcactcttgttgcccaggctggagtgcaatggcacaatctcggctcaccgaaacctctacctcctgggttcaagcgatctcctgcctcagcctcatgagtggctgggattacaggcatgtgccaccacggtcggctaattttttgtatttttagtagaaacggggtttctccatggtggtcaggctaatctcaaactcccaacctcaggtgatgcgcccgcctcggcctcctaaggtgctgagattacaggtgtgagctaccacgcctggccgaagaggaaaatttataataaaataaacttatggcagaaatattttaaaaatatcaaggggctgtttgggggttattctatatttatactaatcacccaaatactcatgtctatagagcttttaacaattggaatttcttacaatgaattataatatctttgattagcatacaaagataaatttatatttgctaaattattctcattaaggcaaatgttgaaataattatcagggtttcgaacaatgaattacaagctccttagcagagcaaaatatatgtgaatttactggacaagtcttatgaagacaagtactgaaactaacaagctattaaagctaaagttaagttggtcagaaaattcatgtaaccaaatcatttgaaacctgagttttgtggttaaaaagcaggctttctgttaatttaatttaacttaatttctgttgagtcttctgttttataaaatatgaaatagcagccccttagtaaaaataaagtatagaaatcataagaaagatctactataaaaaaggctattaagtagattattgataaatcagaactattacttgattagtttgttctcttctttgtgaattacagcaggaaatagtattttaaaagcatattagtatacttctatccattcttcaaaatctgggttaaaaatgtttcttgtgatatcactgctgaagaaaatatcactttgaaatattacttttttaaagttcagtttctgagtcctacttttaatacttgaagacacaatgacaattttaaattttttatttatatattttctagtatattaggatgagtaagaattaattaaaatattagaggctgtagggtctaaaatagttattaaggacaatatggaaagaccatctttcagaaggctgaaattgaaaaggaagcaattccagctgtgcagttggagagtaaatggcctgtgaagtaactgaaccaagttcctcaacatcttaaggtgagggcattttcaaattgtgaaaaatccttattatgaaattagagttttattacatgaatcttttgatcagttgtcatcttgggaagactaacttcaataattggtctggagagaggatggggcaaaaacttacatggggaattctatagcctctgtgtgaggaagaggttagagataaaaatggtgtttttacttaaaaaaaaaaaaaaaagaaaaagaaaggagcaacatgcatgttcagtcctgattgctttctggatcttgctaaagctgctagaacatttcctgtgttatcgattttgtatattacctcagttcacctctgctgacagcagttggtttagctgcactgggattcatccaatattcccaaccgtgatgttaattctatggcaaagtaaataaaagctctgttctgacgtcataatcgctgagttggaacctggctttgccacaggcatgccttcacagaagtcacttaactaagtctaggttcctcatctgtgaactgagaaaactaaaagcactgattccatggggtgctgtgagtattaagtccatggaaggttctcagggggtgccttcccggagcaaaatatgcatgtaacaaatatcagccatcattatttctactaaagcactgaaagaaacacaactaaaagacctaaaacacagctttatattttatagtgattttgggggggcatgccataggaaatgatttgatatctgtagattttaaagtcaaaatgtttcatggctaattgagaaaaatcttgggctctttaagattagtgtgaggtttagagataataaatgtaaagcatgtgacatagtgcctgacagatactcagtaagttgtaggaggttctattattaccaatatcatcatgattcatacatttcttttctctccactttggcttgacatgtggatacatgaggccagtaggaagaagtcacccatgactatctggaacaacattgtggggaaggccaagtttctggtcagtacagagccttcaaaattcctttcccctcaaaaagaggggtccctctgatacctgcttgtctagctctcccccctgccaccgccagatatgtttttttggaatgcattcgttaaataatgaaataattgagttccatgtattctcttcaggctatgtctttgcatttggactgataattcattaagccaggataacgatggaatggcctatgtgggtagctgtaaggaccctgtgatgatctttccgagtttcagattgcacgataaccttgaaacttacaaacctggctttggttgtaaaggattcatgttcaagggaactactgaatggaagttatcaaaagtattaaaatcaacagagcatgcagagaactacaggataattactgtggcattctgttaagatcatacttgacttagaaaactagtggcctgtagattcggtcttatttgccctccaagaatacttatacagcaaaaatacccattcctctggaaatttactctcttggcaattgcataattattattattttttaatctagaaaccaccgtacattcatttaaaactactttgagataggaattttacttacctgagaactgtggtctcttatcatgacttcagttttctaaatttaacttatggatgtataatcttattaattaactgtgaacatggtttctgagagaaaaagacctgcctaatgtctaccacccttacagtataagagcagcaggatcttcgtctgtgtgcgggaaggaacgtcacaggattgggactatgtatttgtgcactttagaaatggggacagaggctgggaggaagatctaagttcattgaaggtgtgtcccaccttactccaggggtagtggatggacttgaaagctggacagaagaatcatcttactgggtggcagtggcctcttcaggctttggactgtggagagacacctgcctctctgtaagaacggtaaaaagcctccctgcctgtggtacttggcctgtatgtaatatctcaaaggcggttaggaacaggaagaaagttcctctgacttggtgtttccctgaaatgctgattagataaataacagtgcatgccgcacaatgacaaaagcaacttataaacatcaagggttatgtgaggcaaccgtacatctgattttggtattgtggtatttgatatttcaagagactaaaataaaagagaaagtataaaaataagcagtttcccagggagttatggcaaagctcaggacatcaaacgagactgaaccaagtgagaagtgcaactacctccaagggtaaaagaaataggccgggcgcagtggctcatgcctgtaatcccagcactttgggaggctgaggcaggtggatcacctgaggtcgggggttcgagaccagcctgaccaacatggagaaaccttgtctctactaaaaatacaaaattagccaggcgtggtggcgcatgcctatagtcccagctactcgggaagctgaggcaggacaatcgcttgaacctgggaggcagaggttgcagtgagccaagattgcaccactgcactccagcctgggcaacaagagtgaaactctgtcaaaaaaaaaaaagaaagaaagaaagaaagaaacagtgccagcctaccagaccatctgaagtagtctgtcttactccagtggagcaggcttccccaagctgggggccaaaaaaccccagggaaacacagggttcatcaaataatggctaaagtgagctcatttttatatctatacaaatataaacatatacaatacatgtaaatgtacagatttgtgtatgtaacaatcatttaagggtgtatggaaaactacttaaatatactatttatggtagtgttttatcttctcaagagatactaaaagctgtattatttttatacagaggtctactaaaatgttttggctctgaaaaatgactctcacttgcaaatgctggaatttagagcaaaacagtattcccttcctaaaacaaacataacagtcataacggtattccatttctgaagcataatgatacacctatcaaaatggttaacatttgagtttgaattaggttgtcattgtttcttctctctctttaatacattttaaaatatgtttttctacaggtgcggtcttactaagttgcccaggctggtcttgtactcttggcctcaagcaatcctcccacctcagcctcccaaagcactgggattacacacatgagctactaggcccggcctcttctgtctttttgtaggtgtgtttatgaactaagtagtgacccaatatgaatttccaagtcaaagggaacaactgcaagacaaataaggtagtcagggcccttcaaacaaaaataagtgccctgctgtcatgagaatcaacacaatctcctctgggcccagcaaagagaggaccctctgcctccttctcatactctgtgtgagcaccaagtgaccatccaaactattttagggcagtgctcaactggggcaggtcacaccatgtggtccactcccattttttttttgagacggagtctcgctctgtggcccaggctggagtgcagtggcacaatctcagctcactgcaacctccgcctcctgggttcaagtgattctcctgcctcagcctcctgagtagctgggactactggcatgcaccaccatgcctgggtaatttcgtatttttagtagagacagggtttctccttgttgctcaggctggtctcaaactcctgacctcaggtgatctgcctgcctcatcctcccaaagtgctgggattataggcctgagccaccacgcctggcctgtttatttttataagtaatgatttgctttatgcatctccagatttaatatgccactctatccaaaactgggaaaattttatttatttctcaaagttttttaaataaaccctctctacagacattaggaagttaattagagatacttaagatatttgggtcaaaaccaaaacatttaaaatcatttttagcaggaccaacttttggtatgaaataaacacatactgaaatcatctgtaaatttactattcataaacatagcttaagaaaatacctaacgcagcactctacaatgcagtgcccgtgaatgaataaatgaatgacacctgcccactgtttatatgattccatacgtatctcggactatatgcatgactctaatacatgtgaatatggtattctatctatacgaaaagacaaagatctttcttctaataaatgaatcttttgctcattataccccaagtccccatttgggagaagtgatatttagggaggaattattgggaagaggccgggcgcagtgcctcacgcctgtaatcccagcactttgggaggccaaggcaggcggatcacctgaggtcaggagttcaagaccagcttggccaacatggcgaaaccccgtgtctactaaaaataaaattaaaaaaagaaattagcagggtgtggtggtgcgagcctgtaatcccagctactcaggaggctgaggcaggagaccagcttgaaccttggaggcagaggttgcagtgagctgagatggtgccactgcactccagcctgggtgacagagcaaaactccatcataacaaaaaaaaaaaaaaaagaggaatgattgggaagatttgttgtccatctattccatcatatgctcacttgtcttgttggttgaagtcgaaccatggaatagaggatgttcggccaaatttccttgctaccctgctagtctgtctgtccaccttaaatgttttcgctgggttaccttttggtattataatgttagcttttatagtaagaaactcgtttagagcactttaatgtaaaattccatataagaaatttattttagagctatgaggtagaaaaagctcggttctcctgaggaggtgttatttaccgtctttataacataattgtcatgtttccattttaactttggccatgaagaaacacattttgtggcctggatgtttatgtttagctgtttttctggagagctttgcttcttgcctctttttattttgtttcttgatgatggatattttctttaaaatcacatattatccttatgtataatgtgattttagtttccgaggttttattggtaagttaagctacctcagttctttagtggaaaatacaaggatatagatgttattataggtatagatacggaactcttagctaagcacatgcactctctctccctccttccctctctccttcctgtgcgtgtatttaaattgcacaattcagtttaagtcatttccaatcttctccttgtacaaatgtgcctttggtttttaaagattcattagacctatgctttgtcttggtaaacataaccatatacacaattgtctgcctttaagagaattgaaacaatcccagaattgtgttcccaacatagcttagtataaggtgtaattaaacatttaaggacatttgagaggcaactgtggaaaaccgacctggagaggtcatcgggcagagccatgctgagctcctcaccactaccatgcacattctcccaaaacaagcgcattctcaggatattgcttttgctttcttcttcttgatgagctgcttcacacacattctattctcaagaaccaacttcctacctgacctggctcccatctaacttaataaaaagaaaacctgttttttatttcatctatagataaattatggtctgaaatgaactactagtgaacccatgcaaaggctatatatatatatatatatatatatatatatatatatatatatatttgtatacacacaaatatatatatatacacatatatatacatgtatatatatgttagtaaatggccactcgaggtatagaaagtcacccaaagacatcacaaaaactatttaaatatttgaaatataattgaaacaggcctattctcaatgaaaaaaaaaagtgccacgttccctctgacttctgattgctaaatcaaaacgcttagaaagggtttgttggaaaatgaatctgtctgtcgagtaaactcagagaagcgctcaaagggatcgccgagtaatgattctgaagctgtactgtgtttcctcaggagacaatcttctagacctctgaaatgaatgagtccttaaccaaatgaatttttgtaaatatttctataaactagtaaaaacttttagagcaaaggagttcatctcaggagagtaagatataggagacccacaatgatggaggctctgttctatcaagacacaaaacagataggttgagccataaaacatgaaaccataaggctctaaaatataacccttgcataacatataaaaatatatgaatatatgcattatacatgtactttatatacatgtatttttatataatacatatataaaaataaattttgtatatttatataaattcaacaatcccactactgggtttctacccaaaggaaaagaaaaaataaatttggtatatttgtatgaatccaacaatcccaccactgggtttctacccataggaaaagaagtcgttatatcaaaaagacatctgcactcatgtgtttactgtagcagtactcacaatggcaaagatatggaatcaacctaagtgtccatcaacagatgactgaataaagaaaatgtggtatatatacaatggaatcctattcagccataaaaaatgaaattatgttttttgcagcataatgaatggaactggaggtcattaccttaagtgaaacaactcaaaacgtcaaatactttatgttctcacttgtaagtgggagctaaataatgtgtaagcatagacgtagaatgacaagcattggagactcagaagggctaggggtatgtggggagggggtggatgatgaaagatgacttaatggggacaatgtacattatctgggtgatggatctaccaaaagcccagacttcaccgctacacaatatatccacatgacaaaattacactcgtacttcttaaatttatataaattaagataaataaataaaagggtaaaaaaaagaaaaaataaagtcattgcattaaaaatctttcaagcattgctttatcatcgcataaatgtagccaaagattctgaagaattatgagggcttctgtgaagacattgtttcactgccactcaatataacttgtgaaaactttggtcaagaactctaaactaggaaaacatgcaaagaaatgttcactcatagcaatatttgacacagttgatttttctgctgcatttctttttctacaaagagaaatattattcaaagagaaaaaatttgccaggcatggtggcaggtgcctgtaatcccagctactcaggaggatgaggcaggagaattgcttgaacccgggaggcggaggttgaagtgagctgagatcgctccactgcactccagcttgggtgacagagctagactccatctcagaaaaaaaaaaaaaaaaaaagaaaagaaatatattcccttcaatgtcatgcctggctgtgtgtctgacactgttcaagatctaatgaaaggaaatgttaagacacacctagtatgtgattcagcccaaattccagccaggccaaggtggctctgcaactgtgctctttgccacaaatgaccctgtgtcctgcagaataaaggacactacaagtaatagcactggagtacaatgtgtgccctatgcatatatttataaaatgctatggttcccactgacgagaagggcctggccacaccctactccattttcaatgcgtttcctgtgtttctatctcttactgaaaagaaatgctgattttgtaacaaagaagccttgctatccttcaaaacccctttatgaagttgacttcattttatcctctccatttccatcaatactcccaactctggagactttctccccattcctctcctgtcctcccttctctcttgcctcatattcagaacacagatagagcttgaagatcatggcttctggtatgaaacttttattattcatttatgtgtttgtttgttttttgagtctgggtctcactctctttcccaggctggcgttcagtggctcaatcatggctcactgcaggctcagcctccttagctcaacctcctcccacctcagcctccttagctcaaccgcctcccacctcagcctcctgagtcgccgagatggcaggcatgagccagcacatctgactgcaacttttattctataacctaaatcctgtgggtatacaaagatgcagatataaacaggtatcacagactgtattatatatgagaaataaaatatttataatttctctacatcagtaaatcagaatttaacattatccaaattcccttccagacttttctcaggtgcgtggtttcagagtaggactcgtttcttatatacaatgcggtgtttgattttttaaaaaaaaaaaacttcccttggaaaatactaaaactattatgcattgagtcatttaatattcagaataacctcacaaagcaggtgttaacaacttccattttaccctttataaaataaagactctagagagattagataagtagcttgtccaagtttacaaacaagtttatgccctttctactgagctacatttcctttattgtcttataacataaacttatctcatatgtctgataaaaactgtccaagaggcttcaaaattatgatgattttcttttcttttcgagacagagtctcgctctgtcacccaggctggagtgcagtggcatgatcatggctcactgcagccttgacctcctgggttcaagtgatcttcttgcctcagcctcctgagtagctggagctacaggtgtgcaccaccatgcctggctaattttttttattttttgtataggtggagtctcactatattgctcaggctggtcttgaactcctgggctcagtcttcccaccccagcctctcaaagtcctgggattataagcatgagccaccacgcccagcctgattttctccttgagtgcgcaagtttccctcttggtggatacacttaaccgcactttaatggttctaagatacacattttaacatctaagtcgggatgtatctcaagatcaaggacaactgacatttgctgtcacgttggccaggtggcagcggtgacagactggtcactgcctgcaggggcttaatatggttatagtttcagtggcacaactgggcaactgtaactcatttatgtcaggtccacagatgacaaggatctcttgcagaaaaaatagaagacctggctgggttctgaaaacctcttattgacacattattagatcaagaagcaattagcatcaacattcacagaacagtttgtgagcaacttgcaggaagatcccagagatggctgcagggcacagataagaaatgccacatcactagtgctctccatggcacagagaaatacttatggaaaaacatggactttgatgattcacaattgaaaagtgactcagaagagctggactttgtaggagaaaaacattgaaaataatctaaccaattatttcacttatttttcattttcatgtatgcacaaaatgcatgtttaaataaccctaaaaaactctttcagtaagtgtagtttttaattagcagtgcttctttcttttctcagtggtgtgtagctagcctcgtacaggtgacaaaatataggtaatttatttgaagcatctcttattgtttggcactcattattttcaaatgtttgctattaaagatagataatgctaggccgggcatggtggctcatgcctgtaatcgcagcactttggaaggccgaggcgggtggatcatctgaggtcaggagttcgagaccagcctggccaacatggtgaaaccccgtctctactaaaaatacaaaaattagctggctgtggtggtgggcacctgtaatcccagctactcaggtggctgaggcaggagaatcgcttgcacccaggaggtggaggttgcagtgagccgagatcatgccactgcactgcagcctgggcaacaagaacgaaactccatctcaaaaaaaaaaaaaaaaaaaaaaaaaagagtttctattttgtcatagtaggagaaaagggaaagggtattcaaaacaagaagctgtcactaaacaaaaaatcataattaccttgagatcctggcagcttctttgttagccctccatttcaccatgctaattataaagaaaagtaaacttacattttttgctctggagaacatcaagcaaaatatttgatctgctgtctaagcacctgatggtatgaacaattggaactgttagacaacaaacaatagcattaaacactcaccttcccgtttcgaatgttacataataaacagccggatactgctgacattaacacccattattgtgctgcattagttttatgggtgcaataaacactcctggatgatgaacattttgtaattcaaagaatgactcatggaaaatagttttcatttgctaaagtgctgcagggttgcattaaaaaatgtcttgctgtgctgaaattgattccatctgaacggcagttcaaaagctaccagcaactttaaaaatgcacaaggatgttttgcttctttcatctatttgggaaaacagaagcaaccaaatataataatgttcctgggacccactgcatggttatgtcctgttacataaacaagcattatataaaacagagtcatgattagcctatctttttatggaacaaataaacattaaccaaataaaaccagtttttaccagatggcatccaataaaatattaccattgaggctcattctgtccaaacctttaaaaaatgttaccataccttgatttaggttgacctgacagaccaacatctgaacttttaaaaaagattttaccaaaggattcgctgagtgattctttcgagacgagtctaaaccaatacaatcaaatagaattcagttcaaactgactgttttctctgatcgcaatgattgtgttaaacggtaagactgaagaagtcacttcctattaaacattttctcatttcgtttcttcttggggatttaattaaaccagattctgaagaggatggtgactagttggttattgttagcaagacaggagttagagcaaatgacattgtaacaccaggaatgtctctctttgagattttaaaactagaagagattctcattattctggattttaggatgtatgaatgactcttcaaagactcattcattgcaatggtttagtctgaatgtaatcccaggaaaataaatttgtttttgagctctgaagatccaatatctaaaatgttgatgtagaaaacataatttaatctttataacatccccatgtgggacatggttagctctagatcactctgaattttaatccagtagtgcttcataagaccatacacctttctgaagggtttcagagcacaaaccttcaaatatgttcagttattgacacacaaagcttaaaaataagaaattttgagtaccaaaacaagtatgttttaaagtactcactcttcagtctgaaattccatgattctatacctgggttattttcactgtggacaataactagcttgctctagctttgccaatgttgccacaaccatctataaacaaactcaaaaactgaaaaatagaaaacaacactatatttttcattttttctctaggaaagttagaaataagtatattttctctcctttcaagttctgaaacaaaaaccccactaatcgtgtatacttgcactgactcttgcctcagtaaatctcagttaagtaatttgttacagtagcatttcctcattctggtataatttttatgtacagactgttttcattatttcaccctcataaaaatatacttttataatctagcctacagagttgctactcaatcatgtttcataacaagttctataggtacataccggaatgttattcaccattggcttagaatttaacagtttataaaggtgcaaatatctgggatttggggctgaaaggtactattatgttattaccgtgaacgcacgttcattgtaaatactgtggtaacccaggcctgaaagaatctatgaagttaacattatgcattttttgggttttgaggtttctgaaatgcatccatcactcctgaccaattgacgtttacaaataccacgaggcctgaccatcaggcagctttgttttcattccctgcacggcccttgccctcttcctgtctcggcatctttatctaacctctgtaaccagtcacaactcatttattatcatctgaaaaatagtgctgaaatgtttatacacaatcaatttgtaattaataggaaatgactttatggggtcgtttgatccctgctggtgggagaaagcctgggttatgtctaatggattttttccatctccttcagtggtgacgtgtggcaaatggattgtaaatgaagatagactgtgtaatgaatgacgacactaaagactaatgtgaaggactttagggaaaacaaaaggctttcatctgaaaggatgatctgtggaccaaggtcactcataccactcactgctcattttctcatgttattttaaaacttttttcggcctttatactgctttcagcagcatttgtgtgtaagaagtggacgatgactttaataaagagacccgaatggaactgaatggagcatttgtttttgaagcaacttttactgtcctcagttttatctcatagaagcctccctccaagggcactgccatagactcacatgtttcctctaatgccttgaaaagcattttcctaaaatgaaggtcttgggaacattttacctgttggccagaaacctaaatagtaatcagctctgaaggtcattctgatggcatggaaaaagcattgtgctctagaggaaaaagctaactacgagggtagcctggggaggaccaggagagtacatacaaacaggttttgctgcagtcacactgcagacgtttgacatctatttttctgcttttcctttctacatttctctcatttccttccctctttccttctcttttgtcctttcttcctttctcccaaaaatatttattgggaattccctatgtgctacacttgtactggtaagaagaaaattaacaggtccttctgccccccacccccagcattaagtttaatgaaggagagatattaatactcactctactgaatgtatgattgcaaagcaagataagtgctctggattaaaggaacgtagctctctaagaaggttaagtaacacaaaaaaacctaaccctggtaattttgaagatttgggatcttgcaataagaaggtttgtaggtgaagtaatatttgacctggaaactgaagactgtggtgttaaccagacataaggaggctggaggaagaagcagcataagcaaagggcccgtggtcatcaacgatctgtatgaacttgtataggaagaaagcagagagggaaatggcaggtggataagtaaggagaagcgagatcacaatagggtcaagtgggtcaggaagatactgaagggtttccaactggaggaaattagagggccactcagggtgcagtatgagtcatggaccggagggaaacaagaatggatgcaagaagactgaattaggaggaatttcagagtccaggtagaagatggtggactttgatccaaaatcattgaaactaagaaaaccaggggcctcagatgttctttggtctgttttcatctaaaaactattgtatggatatggctgtcccaccaggcagcaaccagaagttagaggtgggagcatggcttgcagagttattctggacatgtcagtctcagtgcctgtcacgcccacagttgcttttgagtgcaaaccacccagtcacctgcctgtgaagcatagtgagccaattcattactaatgattatcacagaatcgatcacattagccaactgactcaatagctggattcttgaagtggcctggtataaaaagaggactggtttgtgaatagagaatttgacgcccaagatacgacactcccagcacattcattttcaacagtgcttctcaatggtggcaattttacttcccaggggacattttctgtgtctggagacatttttgattgtcacaactagggaggtgagaactggcacctggtctgtagaggagagcgatgctattaaacatgctacagtgcacaggcagcccccacctcccccaacaaagaattatgtggccccaaatagtaacagtgcacaggttgactatacaactcgtcaaatccttagaatctgcaaagggctgtcttttcgtatgctaatgagctgactcatggctggcagctcccaggtagctacaggatggggctgggtaccagaaagaccaagccaggattagagggttgggacttttggccccaccccaacctcatgggagggtagaggggctgaaggttaagtggatcaccaatggccaatggtttaattaatcacgcctatctaacaaatactctataaagtccctgaggacagggtttgggaagcttctggagagctgaatacatggagtttcctggagggcggtgtggcagggaaggcacagaagctccgcaccccttccctcataccctgccctgtgcgtctcttcatctgtatcctttgtatccttttcatttctttgaaacagggtctaactctgttgcccaggctggagtgcagtggcacgatctcagctcactgtaacctccgcctcccgggctcaagggatcctctcacctcagcctcctgagtagctgggactataggtgcaagccaccatgcctagctcatcttttgtgttttttatagagacaaggtttcgccatgttgtccaggctggtattgaactcctgtcctcgagggatccacctgcctcggcctcccaacctgctgggattataggcatgagccaccactgctggcccataatatcctttataataaaacagcaaatgtttccctgagtcatgtgagccactctagtaaattaatcaaacctaagaagggggacatgggaaccccagctatagccagccggtcagaagcacaggttattcaacctggggtttgcgactggtatcaaaaattggggagaggcagacttgggactgaaccttcaacctgcgggatctgacactattttcaggtagacagcatcagaatggtactgaactgggggacaccctactggtgtctgctgcttgatgagtggggaaaacctccctgacatttggtcactgaagtcttctgtgttgattgtcgtggtgtgagagcagaggaaaaacagtttgtgttttttccactcagattgagaaaccctgactgtcaacgatagaacgggtcaagacttccatgtattatgaatatggcagacaaaataaaattcttagtttcataacggaaataaaggagaaatgtgatgttccgggaaagcagctgagacacattctaacagtatagcttatttgcaatacattgggtatttactcaaccagtgtttactaggcatcaaacaaactcaaaatacttgttagaaaaaaagacaatacctaagatgttttcacagattcactaatcaccaacatttctttgaatgtaaaaaatcttataaaggttgtttgcagaaattaaattagtaatttcccaaatttgacatgctatttgattctgttagcagataatacaactaacttttttttgttcgtacgttttcatggttacagagctggagaaagaaacgttatgtatgagaaaatactttggtttaaattgtttacgagtaatttctctcatactgatgtgctaaatggcttctctttgtccctccaggtcactctccatcttttccgccagtgcccaactgactgatctttacagatggtgtcaacagatgcatctaccctctggcttcaagttgagttggccaatgaagggtgagagaaaactgaagtagggttctttattcacccagcccttccccaagaggtcaccacggcctcacggtggcccccatggctcatattagagagacatttgcgtagctctgtttccactcacctcttccagcctagggtgggagcagagcccctacaatagctcttgcatttgccttatatcacggtcacagcaccgaaaatagtctcattattaaactctcactgaagaagtgttctaattgaattggactattctgtgctgagagcctaatgagtagaacttctctaatgatgatgtagatgttcatgaagatttacagtttccacgtatgttcacccagtacatcacaatggatgcacaaatgatctgtataatatatacatgtaactggaatgagtccacagatgcagcatttgatgtacaaaaatcttcacaaaaccaaagcatagggcagaagaaaagctttgtaactctttaaattatagatgattccaggcatcagtgtagtatttgcatagctctcttagaacaagggacactgggaactcaggaagaatcagaactcttttcatgaatttctttagtgcagtcaagtttcctcttttatgaaccagcatagttaacccatcttctaaagaattcgttcattaccacttacatagttcaatccccagcttgcttggagattgaaaaatatctctaagatacttgattacataagtgttctgcctagaaatcccaaaactcttactctttttgctgtcataggaggcgctgcggaaagtacatgacatttgcagttgtgggcgactgtgctgtgggatgaaaccaggctcctcatcaagatgaacatagattcaagtctccatcttagccatttcctagttctgtgattataaataaactccttgacttttctgagccttagtttcatgatctctgtaatgagaataatattatctcttcccaagcatttgataataattaagtgaggtgatataaactgcctagaccagtttttgactgtagaggtttttctttctttctttctttactctaatttcacctctggaaaagcagtcaaaatgagaaaagtcaaacccgcatcagaaaagaagcaacttgacacacacatgcaattaacccacttcaccaggatatgtcaccaaattgacatcaccagaaatagctgatacaatggtttgcttcaccgtttatcagtaatctcttatcttctctttcctttttacttcgctcatatcttattgtcctgctgtcatcttttcatgccatgcatctctgggacacccagcctgaagtggcatatatttgatgctcaataatacatggcagatgacataagatattggctttgcaaaatctaccgctgttctgaactatcatacaaaacaattagttgttagtatgccatctttcttattaatcttcctcaataatatgaataatcttaatatttccatttaagaaaaatgcaagctatatgttattctcatttgacaaaaaaattattctaagaggaaacattggaaaatgagtttcaaaatagtggtacacaaatttgattctatgtcaaatggttttaaatataaaagtagcataatcatcaggagaggactttaaaattcactctttctacagatcttgaatggccagataaaaatcagaactccaaccagttcccaccatctctgatgtgagctcctattttgtgtgccggatgactcagtggacgccagcagcagatcaatttaccgtagcacaaggtgtctctgtcccaaggtttgtgtacttgcatttgcggcaagtccagtcatatattacacatctcctctggctgtaactggagaccgtcaaggtacaatagtgctgaaagaagtgtacttttccagccagggaatttgtaacagatcctgcttcatcttgcatcgccatacaaagtacctccattccatccttcctaaaagtgcttcagtgactgaaagtggaaaaagtggagcagaatagagcttgtatgcctcagagattccagccatccaacagtcctaactcaatgtaatttaaatcttgcatgtttttacttttaaaaaaatttggcaactctaaaaaagtttaccagaaaatagtgtatctgcgaattttcactagtttccttcaagaagctaggattttcgtagactgaatacattaaatattgagatttaataaaattaattttgctgatacaaaggaaaagtgaaagaaaaagtgagacagaatactacaattctctctttcagtgataagtaaatggtaacaaaagtcatctgtacaaattcacagaatatgatgtcataaagatgggtcatcaaaatgcttttcagtgatccattcaataagatgtcccatcatgagggtttgagtagcgaataggaaaggaagttgtgaggcttcctccttcgatgggagcccctcagcacctgagaggcagagggctgggcggggaatgctgatactttccttgtcaattacgaggctggcttccccttcatgattaaagagcagaaaggggcaaatcagatagctcatggcttaagtcgtttgcattatgtgtaggtttcaattttccatggttcccattctcgtagacgttagacagctacgctttaatcttttccttggcagctttaatctctctccactcagccatttctaaattggggataacatcaataccgtaaggattagctaagcatatctgtaagtacgtgacaatcactgtaggctgttttttataacgtgacttcaaaaccgaatctgttacggagttgctcaagttaaccatctcccgataatgagttgtttatggaggtgaagatgaacaacccagatgctttgcaatggtggcgttagaaaaatattttattaaatttttccctattatcctggaggaatatgtcacacaacaaaatatggagagagaggaagagaaaaaaaaagaaatggaaagtattttaattgatcaggagttcaagactagcctggctgatacaacaagaccctgtctctgaaaaaacaaagaaggacgaagtagaaagtatatttctgagaagatacaggttatagagatcctcagttcacaaagcaatggatatttacttttccactatacagccctatcagccgaccacaacgctggtttgctatttttagccagttcttttctgcaggatgtctgcaagccttccgggatttcaaagcgatccttccagtcttcttcaaaaggagtagtcttgcattccccaacatttccagtatcaacactcttcagcaccttcacctccagagattcctttattcagactgccctgctattggagctgcctgttacaggaacactgccaatcacgtaagccacacaattgttaaaacactggctcacattgggaaaacaggagttgttcatttcatggaaagcattcttcatctgatgaatggatttggttatcaacatagtcctttcattggtgagcccctgatttatttacacttgccacagctctaatcaggcacatggtagctgtgtatggtgaagcactggctttcaggagaattcttttagctttaacagtcgtggttagcataactatgtggttatcttctactgtaaaaaataattctaggacataaatttgattaacttctggaaggttgttgataacagtggtcctctccccttcctctctctgtcccagcccctcattggagtgcatcactcagaatgatttctagtgcactaagggagaacacactgggcagagcagccctgggtcttggctctggctttggcactgagcaagtctctgaaccctccccatccctgatccttcatggaaggttccttccagctcttataactcacattcataggaacgaatcatggaattgagcctcagaaatgaatcctatttcaggaacttttctcatttcttctggaacgcatcaggtttgcataacctatgttttttattgagagtgatatgacattctgctttccttcttgttttatcatttgtaattaatgacagctattggcccaatttctccttcatgaaattacagcgattatcatttcctttccattttcttagaaaatcttttgtagactttctgtatttcttaacattcagcaattgttatagttcgcagagtgctttatggattacagaatggtttcatttagcttttcctttaaaaattgacatgctcatatggcagatattattattctcatttctaggggaggagaggaagacctaggaaatatagtaacccagtttagtttccttgctagtaaactgagggaactgaaactgaaaattcatatcgtttgactcctaactcaagtagttaggactgtcaagttagatacaaaccctgaacgaagctttctaagaggcctttgggaaagctatttaatctctctgagcttcagttctctcctctgtagaatgggaagaatactggctaagtgtcagtgaggttaagagcattaaaggggataatctgtatggggggagccccacacagagtccagcagataatgagcagacactccacaaaggtgagtgtcttgtcccatcttcttctatagtcttccttgtctctgttgtggtcaaccttggatctatgctgcttatgctggaaaagtacgccctgcctcctttcctgagtaacttattctttgggatcagtcatataatacttaaaaagaattattttagagatggggtcttgctttgtcacccaggctggagtgcagtggtgccatcattactcactgctcctgggctcaagtgatcctcctgcctcagcctcctgagcagctgggactgcagacatgccaccatgcttggctaagtttcttttttttaattttttttttttgtagagacaggactttggtatgttgcccaggctggtctccagctcctggcctcaagcaatcttcctgcctctgcctcccaaagctctgggatttgtgaaccaccgtgcctggccaatttttctatagacctttgtataccaaatttgtgaaactccacttgcaatctgattggcaatgagcattcgtttgcacgtgatgattactctggaagtgtaagctctaccccctacatttgtaaatgaaaaagacacaaaaggagagaaacacttctacacgacctccttccttagatacagtatcagggttctaacattaacttcttacatttaaaaaaaaattctgaaatttatttaaaagaactaaagaagaaaaatatgtctcttatttccttggatactttcctgaatactaaaatcagttaattttcaagacaagaattgttaaaagacgctcaatcaataaatgaccattcctttgcgatgtgtattactccactagaatggaagcagcatgaaagcagatatctgtctcatctgttttgctctttatctccaggtggtacagcagagccaggaacccaggaggtcacagtcaatatttgtgacatgaatgaatgagtgaaatgagtacatgaacaggttgagtggtctgtgagtgtgaggatagatatacagaggtacagaagatgctctcctgccttcagggagcttgcagtcagcctcaagagacacaatttacaagaaaagacgagtagtccacactgccagggagtgagtgggtggtgtccattagagcacaaggagggagcctgccttagaagtttggggaagcaaaagttcaccgtggggccagaaacctcacttcgttataggagttaataagaaattattttaggcagatacgaaaaagggtccttgccaagtttttgtttcttttaaagtagctcaagaaacatttcttgcctagcagaaaagcccccaccggcaagctttgatatgcaaatgtacgccattagaaactgggtccacccaaacaaggcaatacccgctgtcttttcctggtgcccacaagtgcctggcaacatggctgccccacataaccccacgtgtgtagaacatcatggcgccctgcatttgcatattaaaagactagggtgggagggccagttatttcacgggctatgtgaatgacatgcctggtcaaaccaatcccctgtgccctatgcaaatcagacaccgcctcctccagactcctcatataagcagccactttgctgccgcacagcgagttttctctttgttccaatccccactccctccgtctctatactggggagctgttttcttcttccttccttctttcttgcctattaaacttttcgctccatgaaaccactccatgtgtgtccgtgtcattaatcctatcggcgtgagaccaagaaccctggtgttcctccagtcatccgagtcgtatcaacttgttcccaccccaaaaatcactctgacaaggcttttcagtgaatacacgcagcattaaaacaatggccatattcaagccaaaaagttgccactgattgagtttatatgaatgttgagaccaaaaacacaaaaacagcttgccatgatataagacaatggttttgtttgcatctatgacattctcattgttatattattacttaatattctgataaactgtgtgatttgctgaggccactttggactttttccctaaaacagtcattcttctttttgagaatatatcctctaatgccactggtccttaaatatgtacatgtacagctgggtttaaaattgataaacgcattgtcttagagtcctagccctagaggcagaataggatgtggtgggtggtcagaattataattagtgcaagaaagggacacattttacaaaatagcacattttttttctaattttaaggatgaaagtactcaatggataactgaaaaacacagaaatatatttttaaaacgcatctccccccagagagaaccattataacttttgcttgcattcttagtgtcatagtcgcatattcaaaatatgtatgagacgcgtatatttgttcatgtctatttaaaaagatacattttggaaatatatgatgatgactgttaaatgtcagacattatttactcactctacacatttcgctgagtgacaactgtcagcatctgcactgtatcggtaggcatgggggaggtggctggagaagaaagcacacaagattacctcctctcagagttacgatcccatgggtcaagcaggtattaggcccaaatgaaattttaattacaaaacatatatgcaatatagagtccgggtgcagggtgacagggcgctataagaaagaactaactagggactcaatccatatcacagagcatagaagtctcctctggcaagacaggacttaagctgagaggtcaaagataagaaggcaatttctttgatggaagggaggagcgctgtgtgggagcgaaggattccagacacagggaacagcacacacagactcggaggagccacactacccttcctggagtgcagacagcgaggtggagagtaagctgaaacagagctggagagcaaggactgcgctataaccgcgctatgtgccaggcttgggatctcacgtgaaacaaatggaggacctgatggcttttaagcacaggagtgggcgtggtctaatttgcattttgaaaatgactgccctggctgcaatgccaagagggccgtggtaagaggctacagcatagtttccaggcaagaaggcatggtctctcgaactagcgtggtggcggcacgggtagaggaaagtggatgagtttaggctgagtcctggaggcggtgccttgtcgcctacagactatggggctgtattagggagacaaaaaaggagataggggaattggacaatttttggtatctggcatgatcatctcggaggtgatggaaacactcatatataaatgatgggaggacatctagttggaaagcgtttcgttttggacgtgttgatttgaaatgttcaagttgtggttttgttttttttttaatggcaatgtagaattctattataaaagccaatttttaaaacacaagtatactacttctggagcacagtttgtttatattttatattagtataatttaaatattgttctgataaacatccttatagatttacctttgcccatatctctgtttacttaggaaacatgcgaggttaattgacatatttaaaagctttttgatgtggcacaaggatctttatttctaagaaagtgactttcatcatcactttagagcacacgggctccccttacagactcatccattgctgaccctgacattaattctatcaactaatcctaatcacaaataagcaatccttaaccagcagaagaaacctaggatagctctatataagccacaagccaaggaaaagttgaacaaagaggattttacggttctttactttcctccttcttattgaactgccatgctattataaaatcaagtcaattttatatgtgatatatatgaaatatgataccacatattatataatatatattacacattgtcatatatatgtgaatattatatgtatataaaatatattcttacatacaacaatacatttacatacataaggtatacatattatatataatattatacatattatatatgtgtatatataatttttgtttggttttcctaacttataaaaaaattttgagcactcagtccttttttttattttttattttactttaagttctgggatacatgtgcagaacatgtaggtttggtacataagtatacacatgccatggcggtttgctgcacctatcaatctgtcacctaggttttaagccccacatgcattaggtatttgtcctaatgctctccctccccttgccccccaccccctgacaggcccctgtgtgatattccactccccgtgtccatgtatgctcattgttcaactcccagttatgagtgaggacatgtggtatttggttttctgttcctgtgttagtttgctgagagagcactcagttcttaaccaaaggctcctaattaagtattagtcaaaattccattacatcttaatttgaaaactacatatatttagttacaaaataaaagcccaattacttcaattacctatattgatgaaataaagttaagtttatatgtcatttctactattctttccttaagtggtttaatttgtcaaatatgtcatcttttcccaaaaatgaatcttgattaattttgacagtttttcttttcaaagcccttataggtactgttgttatatggtgaacactcaagggatacacaagtcctatcattttcatcaccaacacggacttctgatttgttttatttgatatgtcaccttgttgatttaacataaattgttttattttcttaatttctgaaaaatactcatattgctggtttgttttcactgaaggcctcctgtccattttttcccttctgctttatcaaaaaggactgaggtctcaaatgacccatgagaatatttaagtcacttatagagggcaagaagaagcatagaaaaaaaaatatttctggctgggggcagtggctcacacctgtaatttcatcactttgggggaccaaagtggaaggattccttgagccaaggagttcaataccagcctgggcaacatagagagatcctgtctctataaaaaataaaaattatttgggagtggtggtatgtgcctgtggtcccagctcattgggaggctgaggcgggaggatcacttgagcccaggagtctgaggctgcagtgagctatgaccctgttgttgcactccagcctgagtggcagagcaagaccccatctcaaaaagaaaaaaagaaaacatatttcttctttgtctaactccctgaacaaagagaaaaactactttatagacaggtcttgagcactgcgggagagtcaggcacgtggggccccagtatctcatggatttcatgtataagaagcttcttcttcttttttttgagacggagttttgctctgttgcccaggctggagtgcagtggcgcgatcttggctcactgcaagctctgcctcctgggttcatgccattctcctgcctcatcctcccgagtagctgggactacaggcgcctgccaccacgcctggctaattattttgtatttttagtagagacggggtttcaccgtgttagccaggatggtcttgatctcctgacctcgtgatccgcccacctcggcctcctaaagtgctgggattccaggcgtgagccaccgcgcctggccaagaaggttcttctttccagctttcttcagggatcatgcaggtatcttcaaagtctaagatgctaggaagtcatgggcactgtgttgaaatagagggcgtatgccttacataaacacatccaaactcttatggtaacaaactgtgctggccaaaggaaaaactactgtcattcaggccacgagtttgcaactcctggtttatcacaattatagtgatattcctttaaactaaacatttggatgtaatctttttccacctatagaaagagaaatcacccttataacagtggttttaaaactttagtttacacaagaatcctatgacgagcttgttaccactgtgggttcctgggcagcacctcacaagatttctgggtctgcaagtctgggataaacatctctgagacaggtgacccaggcttccacaagcgctgaaggaatttggattcattccaaccagttaacactcagagggtgtcaatccagttctgagaaacttcaagaaatcaacctcacatgatgtagaaagattcaatctgtaaatcatcatagctcttctttccaaagtcttttataattgagtttaaagcagagtacaagcaaatatctcatttgtatgatccatcaaaggtcaattgttttcattatgatagcaaagaggttttatttgttgttttttgttgggttttttttttttttttgagacagagtctcactctgttgctagactggagtgcagtggtgcaatctcgactcactgactcactggaacctccgcctcccgggttcaagagattctcctgcctcagcctcccgaatagctgggactacaggcatgcaccaccacgcccagctgatttttgtatttttagtagagttggggtttcaccatgttggccaggatggtctcgatctcttgacctcgtgatccacctgccttggcccctcaaagtgctgggattacaggcatgagccactgtgcctggccgcaaagagatttttaaaagcctgattttgggcgtgtgtgacactatgggttgaatctcatattctgctattgacggggatgaacttgggcagtttatttcactctcaagcctcagctcagccatggataaaatggagataagaaaagaaatgactgcacgatgtggttgtgaggagtcaatgaggcaatgtacagaaagcacttaccatgcatggcacacacgagggcagaacaaatgtgtgttatctttgtcactacttttctacaagaatcagaacaggatgctaacaacatatgaaactgataattctgcacttgttttcagggatattttaaatggtcacctcctcatcccccaaacataacaagaaaaccccatagaattacagtttttattactttatgttagtgaataaaacttgtatctctattataacactaggatagaggtttttttgttttgttttgttttgttttgtttgagatggagtctcactgtctcccaggctggagtgcagtggtgcgatctcggctcactgcaagctccaccacccgggttcacgctattctcctgcctcagcctcccgagtagctgggactacaggcgaccgccaccaccacgcccggctaattttttgtattttttagtacagacagggtttcaccgtgttagccaggatggtctcgatctcctgacctcgtgatccgcctgcctcggcctcccaaagtgctgggattacaggtgtgagccactgctcccggccctggatagagttttaaactgggggattttgaatcctttcagctctctctgttttgataagatatttctccttatcactatcttatgttattctgaaggtgtaactcatgaaatatgatctgtcccctcctccaatgctatccacttgtttccaagcaatgaaaaatcatagtttctatattcttcttataaaataaaaagaagcagaattctgtgatggaaaaagtaataatgacttgtatacgaattctgtggatttttacttctcccttaattaatgcatcaatgctacatatttttataaaacactaagtccctgtgaaatgtatgtgcctctaaaaactcaatgcattgatatacctaccctattgaaatggataatttcattaatagtaagttagagaatgctgattaaatgaagaaaacacatgaatatatttaaagtgatgatatcttcactttttatggtataattataagtatatgaacaattctacacagaattacatacattatgatcacattagataatttatcattatgattcatcatttttatgctaaacagagaaggaaaaaggaagcaagacaataaggagggtatgggggaaaatgagaaggaagaggagaatccatctactagcaaatgtttattgaccaactactatatactcatgatttcaggagccaaggagaaaagttttaccttggaaaagcttatggtctaattataataactcttttactgctagagaaaaaaatattcatgacacttgttaaggacacacagattttatgaggggggacaccacaaggaggtttgtagttgggaagagtgactgagctcaactccaactacaaggacgagcggagactgatggccaagaagcaggctgcgggtgagcagatggaaaattactaagtgggaacatcaaggccgggggttattactaggctgactcaaaaataatcttgttgaaggcaggccagggtgataagataccaaggctaggggatgaggcatttgatcaggtaccaagggggatcagaccccaagtgcaggggactttcattaaactgacgcagcaggattcttgctgaaattagactaaatgggccaaggacagaccagagtgaggttagggagagagtcactgtcaatacaaaaaataaagaaaagaaagaaagaaaaagacaggagaggcagagacagacagacacacacacatgcacacatgcagaaagagaagaaagataacaaggacatgtaagtaaatggtctagcctctaagtttacaggagttaagagaaagtgagtaaaagtgtgtggaaaagaattcttatatgagattgccctagagtacatcttaagggaagaacctgtctctctctctctctctctctctctatatatatatatatagatagatatagatatagatacagatatatatttagtgtgtgtgtttattatatatttatttatatatgtgtgtgtttattatatacacataataaacacacaccttggtaaaccacttggaggaaggggccccaagatcatgaggaaatgagctgactcagaagcagctgaacagcaatgcttgcgggattaggaggcatttgtcagaggggcagctacgaagggggcagtggagggaaaaaaggatggatcccctgatatactgaagaaatcttgcaaaggacagtggagggtagagagtagggtgttaagtcaacttttaataaccacacacggttttgacatgtccactgctgcttgtctgcaagcagaagtggcgtgattcgatgatagtcttacttctggatggcaaggatgattttttggccagacaatactgttatcattaacaacaacaaaatccccacacattaagtactgggttggctgaaaacagacctataccaaatcaacacctcaccattaaggagctaagcctaccgcacggcattttctctttagccagagccaagattttatgagaaaatatgaagagaacagagagttgccggaatgcaatgtcactgcattgcagggctgtatttgttggcaagcatctgagaccagcctctgcaaactgctgtaggcagggcctggcctaaagcggatgagcccccctggggctcggttgccctggccacaccatgatccttctctatgacttaccctctgaagaaaacacagcttttcctagcagctaaaaaacagtttctctagacttttatcttccatgataaatgcagatgtttaagggtcattttgtaaattatccttctacaatgttttcagttctcaataatcaactacttgatactcacgagaaaagcagaattcttcttaagccttctgattcaaaatgcttctcctaaaaatgtcttcctctgctaataaagtgtttcacatcattacaacacggagaaaacatgtagatcccaggcagtccaggctatgatgaatatctccagcttttcagaaagacaaagttgattccacatcactgtgactcctaatgaccagttgtctcaagggaggtctgagtcacagtcccagcagtgtctccaaaggcagtacggtgctcatggataattacagtttcatatgttggtaaaaacacaatccacccagtgatctcatgtctactcgaacgttacagcagttctagagtatcgctgtagaatcatcgtgaactgtggtattttgcagtaaccattaaagtacaacagtgtttgaatcatctgtgggtctattcgtctgcttgggctgtgataacaaagtaccacagacaggatggcttaaacatcctgtgagaaatgcatcctgtgagaaatgcattatctcacagttctgaaggctggaagcctgagatcaaggttatagcagactggttccttctgaggctgtgcgggagagtctgttgcttgcctttccccttgctggccgtctttggcttccttggcttgtagacgcatcacctggatctctgccttcatctttgcacggtattccccttgcgcgtgtgtccatgtccaaacttcccctttttataaacaaggacaccacttatattggatcaaatgcccaccccactccaaaatgacctaatcttacctaatctgttaatttaccagccactcatttcccaaaaaaagtcacatacgtaggtactggaggttaagacttcagaatatgaattggaaaggaaacagaatttagccaatatcagtggcatttcagtgaaagtaggccacctgatatgaagacccttcttgaaaagattacagagcttaggaacataagttgacctccaactggctttaaagtctctctatagatggcctgctaagctgcacactttccagagactgtggttttgttctcaatcaaaagtctttccttcaaagcatttttccccataggaaaaaataaaatctttagggaagacacatccgtcaacttttcccagtaggtttcatttaaagtccctctctggttggcacttttgctgactgatttctcttttaaccctcatgtcttttcccgcatgccattgttggataatatagcaattcgaacactgtttgaataacaatctagaggacaagagcctttcctgctttcattcatttattcattccacagatgattttcagaaccgctcttcatggcgtgacctctgtaagcccttcaggataaaacatgaataaggcactgtccctgccacgcaaaggcttgcactcaccagtgaaacagaatgaagacacccttctagaataaaggcatccaatttgcttttgtttagaaaactctcacccttccacaaagcaatatgagattttacatattaaagaacaaaaaaattttggtcaatcacggtggctcacacctgtaatcccagcactttgggaggccgagacaggtggatcacctgaggtcaggagttcgacaccagcctggccaacatgaggaaaccccagctctactaaaaatacaaaaaacaacaacaacaacaacaacaaattagccagacatggtggcgggcccctgtaattccagctacgtgggaggttgaggcaagagaatcgcttgaacccgggaggcggaggctgcagtgagctgaggttgcaccactggactccagcctgggcaacagtgagactccatctcaaaaaaaaaaaaaaaatgagagagaaatcaaggcagttgctgacattcaactctaatcagatactcaagacggggtctgtctttctaaacactgttctgtggccccctctgtgcatccctagactgctcaaggagaagatgcttgatcatggctcttcgggatagtttgttactgagtcaggtcgcttctccataatttgcactttaggtgttttggatagtaccttctatgtatgaaatatgttctgcctttctgttccaagtcaaatcattacagatatcaaaatcagccaacaatcaaggctaatgtagctctttccccagttcttaagaaaaatccaaagaaacacagtttgtacccacaaaccaataggcaatgtatcagttagtaaaacccgatccaaattcaataactgagaagtttttctggtccttaaggcacaaggggttcaatcccaagtatctactatttccacaagcttctgtcccaccataaaggggctgagtctcagctatcaataccacattttaaatttattattttatgcttaaatatcacttatctgtaacaagaaactcaaaactaagccatgggagataacacgtttaagagactccttgacttttgcatcagttttctctgcccccataagcttgttgagatataaagcaagataatggcaaacacaaaaatgtctctcactatgtcccagcactattccaagtgctatagcaatattaagacattagatcattagaacaaactccaccaaaaggccaacattttaccatgagtagccattgttagtacccaagaactagttctttagacataccaactttaactagggtattgatagggctaattatcaccaatttgaagctgtccagttaaaacctagaacggtgggctgtttttgagatatgtatatgggtggaaaacatgatttactctccacagagacaccaataatcaatcagagccgtagttggtaacacagagcatcatgggagaatgtggaaaagagacacaggctgcctttgaaaattaagtgggagagtagtgaacaggtatgttttctttttctttgtgacatggtctcactgtcacccaggctggagtgcattggtatgatctcggctcactgcagcctctttctcccaggctcaagtgattctcctgcctcagcctcctgagtagttgggattacaggtgtgcaccaccatgcctggctaagttttgtgttttttgtaaagatgaggtttcaccatgttgcatgttggacaggctggtcctgaactcctgagctcaagtgattagcccgactcggcctcccaaactactgagatgacaggcgtgagccattgcacctggccaacggtaagttttcaatgaggagacacgtgctattcaaacttagtcccatatttagttgtgcgaagagaagtaaatataaagccttcacaagaaaagcaccaaggcacatggtttatcctggctctggttggctccagtttcacccaccctccatccctgcaacaaatatttattgatggccaactgagagtgggcagtatcctcagttccaaaactacaaaggctgaatgcagttgcacataggcaatgggtactgaaaccatcaattacacaaagttataaagtacgtatgggaactcacaaacaggatatttaggagaaggaggtggtgggaagctttcaagacagagaattgaatgttcataagtgtgacatattcagaaattaatttttaaagtaaatttcctcaaatctaatctaaattttaattctgaattcttcaagctgacccttgccaccattgataatagtgtgataaccataaatcccatatttctgatcattcccagttttgagtattctgtctctttgtcaagtcacatgtcccaattttagggctagaaaacatggtcatcacgttgattagaaatgcaatttacagaagatttccctttccgtctgcttctaagactatgcaagagtctcctttcacctcccacactcagcttctgctctcactaccaacagcacagcatgcacggcacggcacagcatggcacgggctgtcagtttcactgaaggtggaaattcctcaagaatgcctaattagaatgttttaaaaaataaattcagcttcttagacagtaagaggactaccttctaaaagattacatagcacagttattttaattccaaatgtaattgaaattccactcagaattgtcttcttgaatgacaagtcattctatttcaacaatgacattgactgattttaattatgacatggtttcctgtcagcctggtgcttgaacccgattttaaggaaaactcattcatctcgtgcttctgccagtgagtgagtgagtgagtgagtgagtgagtgcttcacgagaactggaggagcatgtttcctacgctttgagaaatacatgtgaccttttgaaaagtatatcaagttctgcattgtactagcagtctcaccgtgggtgaggcaatttcttgaaacttctgtttatttactcttacagtgagataggttcaatttttcttaacagagctattgttagggtgaaatgaagtagctgcttagccatgtatctgaatccaagatttttgctctttattgacaccataatgcctcaatcttaaggttgatgggcactaaagtgcttaacttcagaagtggagaactccatatttcctgagcccaggaacaaatgcactaaatccttcgtcaaaaagtacctctaggtctgtcctcctgccccaaagtgatgaaagatgcatttagcagggctctacatccttggttcagtcctcctacaggctcctgattcgaaagctcaccaagtgatgcctcattaaaaccactttattttagctggaagtggaggggagggggaaatgaggaatgaggaagcaatgaacacagaatgatgtgaagagggatgctgcctcagcagggaccggcatccagccccacaggtgctgtgctgtggagtcggctccagcatctactcctttctgtgctatgtaagtggagaattacacatctcttcagagttggaatatcttctcctctctgccccttcaaactcagtgtcatctttggaaatagcagctcacaccactactgctgttcagagactgtcagtggctgcctgcctcctaggttttagagaaatcattctttttttttttttttttttgagatggggtcttgctctgtcacccaggctggagtgcagtggcatgatctcggcccactgcaacccccacctcccggttcaagtgattctcctgtgagtagctgggattacaggcacctgccaccatgtccagctaatttttgtattttttgtagcgatgaggcttcaccaggttggccaggctagtctcgaacttcggacctcaggtcatccacccgcctcggcctcccaaagtgctgagattacaggcgtgagccaccacgcctgaccaagaaattattcttaacattttgtagttcagatattcttttgataatctaggggaacctaggatcctctcacccagaaaaatgtagacacatacacacacacacacacacacacacacacacacacacacacacccttttattctagttccatgctctaaaacttgtccacaaactccagactgaacaacttgctcaggaagatcagaactcaaacttcttatcctgcgtgtcaaagctctctgtaatctcaccattcatcacccaagacttgaccatttctgagatcccagtggaaagcatccactctgataattatctctgatcattccaggcaacttatcctagtatctacactctggttacgttccacctccccgagaaccccagtgcaccaaccctatgagtttcccgcctgtcagcaccactccccacaactgctttcccccccagcagcctggaggccagaacccaccagtgcaaatgtcccttcatattctgccttcatcccctgctcctctattctccccctgtacacatgcctggcaatacaccagtctgtttacattcaaccctctaactacattatgtccgcttcaaagcacgaaagcaacaaagaaaaaggatgcaaatgtgctgatgggtctcacttttaaagacatcactacgcggctcaatcagtatttaaaactgcctggtgattctaacagatttcccgataaatactcctgttctctctcctaaaggaatactcagtgcctttttatcttttgttcagccctttaacctctgcgccctggccatatgttgatggtcttgctatatactttaagaaaatagaagtattctgacaaaaattactttatttttcaccctgaatgcaccattttacctaaatttctctcctctctcattttattgaactgtccatccttctctcatcagacaaactgacccattgtcaacagtgtattttacctcttccattcctcaacaaattcttccgtgcaattgttcctaatatcccactggatcatcagtttccttctcttcactggaatagttccatcagcattcaaatatgctgtaatacttccaccttaaccaaaaaacagtgtgttctttggcccacgtccctctctgactgctgctctatttctcccttctccttcccaggaacagttctccaaagaggtatctgcacttcctgtctcaactttcttttttttttgagatggagttgcactcttgttgcccaggctggagtgcgatggcgcgacctcggctcaccgcaacctctgcctcccaggttcaagcgattctcctgcctcagcctccctagtagctgggattacaggcacgtgccaccacgcctggctaattttgtatttttagtagacagggtttctcctaaagttggtcaggctggtctcgaactcccaacctcacgtgatctgcccgcctcggcctcccaaagtgctgggattacaggcatgagctaccacgcctggcctgtctcaactttcttaacgcccatccactgtctccagaatcaactccagaaagcccttcatccccatgcccccagtgaaaccattctcatcatagtcaccaacactctccaccttgtcaaatccagatgtctgtccagagttctcttcttacttgacctcttggtagcatttgacccagatgagccgcaccctcttgaagcgtttctttgcttttcttctaagacgccacacagcctctgggctgacctcctacatcagtggccatttctgttttctctgtctcttcagagaatgtaggcatgcttcagaactggtccatggccttcccacctcaccctcctctctcctttggtgatctcagaaggttccatggcttaagtactgtctaaacactgatagctcccaaacatatatctccaggaccaatctttcacttgatctccaaactagtatggtcaacagcccagttaccacttgcaggatcccaaatggcacacggcctagacagaattactgatttattaaactccttcctcataaatgtgcttttccctttttacccttattccccatacatgaagaaccattctacatattcttcaaccatcatacattgcaatcctgttgcagctcaccacctccccagccatgacctctgactgctcctgtccaagcccccctcatctctcactggacttgcattccgctccacaccagctttcctgctttgtcattctctggcttaatatcctctaatagcttctcagcatataaagaataaaatccaaactgattgccagggtcttcactgcccttcagactctgaccccacctacttctttgacataatcttactcttctccacccaagctggctacaccaacttgttccagcctaggtacttttatctttgctgttgcctctacagagcagtctcccccaggttttctcatcgctgcaaaatgtgtgcaaaacatcattcaggagtctgttcctgtttttctttgaggagtcctatattgccctatctaaaaatattgcaccctttattctctaacccagtggttttcagtcaggagagacttttgcctccctaggggcatttagcaatggatagagacatttttggtggtcgttactgggagttgctactggcatctagtgagtagaggctagggatgctacaatgcactggacagctgcccacataaaagaattatcagggtcccacaaatgtcagtaggattaaggttgaaaaaccatgccattcgtctacttcgttattatcacagcacttatctgcatcatcataataataattaacatgtatttcagacttaccacgtgccggacaccattctaaagtttttacatttatttcctctttaatcctcatgttccaaccatataaaatgggtcctattattacacagatgggacattaaggcaggaaaaggttaactgtcttgctccagatcaagttggagagctagaatttgaatgtagatggtctggctctaaagcctttacctttaaccattgcattagagggccatgaggttacatttttttcctatattatctgtcttttcccactaatatactatctccatgagaacatggaaataatatacttgtttatctctggatcctctctgtctagacatataggaggccctcaaaaatcttgaacgaatgaagagttctgcatacctttccagcattgcttcttataatctcacacaaagctgacttcccgggaaatgacctgctttctatcctggagacattccagtttcttgctttccctctgattcagcccacactctctcaggtccagtttttcctcctcactcctgtactcaacacgagtatgattgcacccatttctccagccccgcctccaatcttgcataacacatttcagacccatagatccacagagtcattttggtggaaagaacgttagagattacagctttcaaattatttattttacatgtaagaaaagtaagacttggatggctgggcacggtggctcacacctgtaatctcagtactttgggaggccaaggtgggcagtttgtctgaggtgaggagatcgagaccagcctggccaatgtggtgaaaccccatctctactaaaaatacaaaaatttgccaggtgtggttgtgcacgcctgtaattccagctactcgggagtctgaggcaggagaatcacttgaacccaggaggcagaggttgcagtgagccaagatcatgccactgcactccagctggggtgacagagccagattccatttaaaacaaaaaacaaaaaactaagacttggagaaactaagcaagatactgatgaaaattccagtttttcttccttctgtttggaattttcatgtaactctgaaatgcttctgggaagaaagaatttgtagaagctcttagggcaacaggccccccatagcccacttaggaaagcactttttgcagtcctcaaatcgaacaggaccttcatttagatgactacatttccctaggtttatattttctttttttttttgagttggaacctcactttgtcactcagtctggagtgcagtggtgtgatcttggctcactgcaacctctgcctcccgggttcgagtgattctcctgcctcagcctcctgagtagctgggattacaggtgcccaccaccatgcccagctgacttttgtatttttagtagagctggggtttcaccatgttggtcaggctggtcttgaactcctgacctcgtgatccacccgcctcggcctcccaaagtgctgggattataggcatgagccaccgcgcatggccccatattttctttactcttgcccctcagtacaatgtgtctccatgctcttattagaacaatttccacctttgccccttattttatctccaccccaaaatcagaactatggttcttgcctttaaggagtttacaatgtagatagggaaagagatcatgtatgtcttatattagatcttccattactttgcagactggttcataatctgatagaattactggaaaaacaagtgacagctttctctccaacttgttctacttgtttctgagagtgtgactgaaaaaaatgtggtttacacccagatgatgaactgacagttgtatatttaataattaggatatgagaaaataaattccacagataatctgtttgatatcatctatattttctttaatgaaggtggtttaatgcaacaataatttttagaaggcttatgacatttttcctgatgaaacagatttggattaatggtgcttctaggagaaataatttcctcatagatcacgttcaaacacattcagaaaagagatattcaggaaagatcccttgggtggcttaaggccatttcaacctacgaacctagtagttatggacaaataggatattccacatagtaacaaattaccacccctcagattacctaatgattgtaaaagggaaaacttttctttttggaaagatctggcagtcaccaccttaaccaaaaaatcaactgcagcatcactgaattctgatgtcatgaaattgtgtgcctccagatgtgatggcatagaaacatcatctacgacatattcttgccaaaaacatacaaatggtacctactcaagctgtaagaagtaatttctagttaataggaaccaaagggaacatcattacaataaagcaatcacacaaatcctcactgtgggacgttttacaagacaattggcctgttctcttcacaaagtcaatgtcacagggaaaaatagcagggggaatatattagattaatagagatgaaattcctgagcctccagtataacctggttgaagaacaaaagaataaaataatttaaaaagaacaattgaaaaagactaaaagtgaaatggacgttaggttatattagaaaactattaattttcttagttgtattataaaattgaggccatgtaatacaatgcccttactcttggggtctcctgtttctaggagtgaagtacgtcatgatgcctacaatttattttcaaatgcttcttcaaaacacatgcccgtgaggacctagcagtacagcaacatgttaataattaaatccagctagtgggtatttgatgtactattctttcaatcattctgtttgtttaaatgttgaaggtaaaaatgttgaaacgaagctaatggtagtgcttcagaaagttacttagcaaagctatgtcctacttacatttgtcattctgcactccttattaggaaactattttattaaatctcctgtaatataactgatcatatatgcttcacacaggaaagccctcatacggaaagccaaacgcttatatagccaactactttttcttaaatcttctgcaaattctaagtaagtgactggcaagaaatgctttcggggccccaaatagagatgagaagcacccacttaaagccactgtgtggccactagcctgggcctagtttccaaattgacactttcattgacatcaatgtgatgtcagccacatcacttaaatacttacatagattgagtctcaatgtcagttcatttccagagatcagaactgtgtaacatgtcagttctaacaaatgagaccagatatgaatttacacaatatagtcaatctagagactataaagacacaacacatctaaaatttggatctgaaatgcatagtgcagaaatcacacagcccttttgatgcattgacacttttcaaactacagagaagctgaaatgtggcactaagtcattataaatatttaacaggaaaatgctggcataactaaaagagttcaggaacatacatatatccatgaagcttcattgcagatactcatgagacaagcgcctcaagtgactttacatcctggaaaatgaagacaagtataaagaaatatgattctgtgaaagtcatttgtaggacactccatattacggtgtgtcccacaatcataaaacaatgagcttttctctgcaatcccatggcacaggtaagtgcaagattagcatcgctaccaacagccgaaatatttggggtcaaaccctgttacaaaaccactctgtcactgaatttctccaatgcagcagccaacaatttataggaaaaagaacactaatatcaagcctttaaagggtgctccaaacataaaatcatgagtgctctaggaacttttggagcttatgaatcacactatgcaacgtgctcatatatgccaatgcccgccacgttttactcaagttggtgttgatttggagatgggccctgaacattaagtagaatatagaccatcagcagttactaagctaaatgcattgtgatagcttggaagtttagtccacctatttgattctgtcaacttgttgatacagtaaccattgcaatgacaagttgaccattttgagaagtttatgaaccccatcagctctctcctgagagaataatgttgaataaatgaagaaaccaaaccaaatatttggacagcattatcaacaaataaaaggtataacatatgacttagcaaattttttagctatgtctttaaatttttgactgaggttaggtcaagggtaggcacatttaataggcaacatttcataacaagaatgaaaaatgatgatgattcaaatcccaagttatttcccgatcattgcacaattttggtaaacctttaggaagaaaatttgatttcatctacagatcctcttctagtgttccactgattatattactataggaaatatatgttctttgcccttttcattttagaaattcttgtttttgtcattattcactcaacaaacatttctcgagaatcaggcaaacataaattaaaaatggttgacatgttagaaacacaaacaggtgctgaatgagcagagaggacagatatctgatccatgctggctaagtgtgtgagcaggggcttgctgtgagatgtgccatgtgcccggaaatggagggcttcgggccggagtaagaagtgactgatgggatggaggggtagggaatgatgttccaggaagaagcagcagcagtcagaaaggcaagggtggtggaaaagaaccatgtgtttggcagcttcatggcaatggggcagaggctgttgggagctcgcatgttgacagatggtcaagactttgtaatccatgagcaaagctggaccttcttctgagaataaagggctatctttaaaaagtttaagaaagttactaacatgaggaagtgatccttttggggttgataggtgtgatgattgggtttctatgcatgtgtgtgacatgtgtctccctcaaagcttgttaccacatccgtacagcacccataggatgttgggggggtgggtggggaaggaaaaacaagaagaaaaggaaaaagagaacatgagtagatgtgtgttttcgaaagtcaactctggcaagtatgtagaagttggaggaggcaggcctagaaacctatcacaaggttattgccataattggaacaaaaaaatgtgagtgtgagcgaaggcaatggtgagaatagaagaaacagggatgggttggaaagagcaacaagcctacaaatatgttttgtaagtttagcatctgtaagaacctgaaaatggatgaagcttaaaacttgagatgagagttagacatagatatgaattccagaaaaatcaatatatgacatttcttgcccatttacatctccaaatatcttttctttgtagtgttctaatcaaaacatcagcaaaggaaatacaaagcaaagtaaacaaacaaacatccttccatctcctcatccaccctgcttctcctctaaatgatgaactcattcttttcaaaatatattaatggaataaattcaacacttaatgtacatctgaacctaattttgtaaataagacatattttacagcacatatctttcaattaaagtgccaaataagacaataaaaccttcggttggctttttatttcattgaacagataaaaatacttaattaaataaaatgcaaaatgatgacctgtcagattgctccctgactccagaaatcatctttcatccctgactatgtgtgccagggtcatacaaccaaacctctccctggggtgtaccccaacagatgggtacctggcccatgacttagtgttctcacctcctcccatcaatttctactccattccccaacaattacatatccagggtaaaatcggatcaaggaaaaaggaggatttgtgtctccgcagttcatggccctggcatttatagctttccccctttcagttttcttgaattccttctccatcctctccctaccccttatccaggaaaagtgcaacctgtgcatgtggttggtcttcagtgtccacagcaatctcgctgccacagtaatggcactcttatgggatctgtactatagtcagggaaatctcacaatcctcaatgagtttagcagggaacggaagcctgtttcttctcatattttaatttcctgggctttgcatttcttgattttcctctagtttcaaactttggaggtgatgtgaggtcttttcttcctaggttaattcacttttttttctagcccaaaccatctcctacagtatctttagagggacagaactgcagagtcttaaagggcaaaagtgaggcaaacctgggttccaacccaaccttccaattgccagctctgtggtcttacactagtctggctacagttcggtcatctcacctacacaatagggattacaaaatctcttttttcttgggttttttttttctttttgagatggagtttcgctcttgttgcccaggctggagtgcaatggtgtggtctagcttactgcaacctccgcctcctgggctcaagtgattctcctgtctcagccttccaagtagctggaattacaggtgcatgtcaccacacccaggtaatttttgtatttttagcagagacgaggtttcaccaggttggccaggctggtctcgaactcctgacctcaggtgatctgcctgcctcagcctctcaaagtgctgggattacaggcgtgagccactacgccccgccctcttgagattttttaaaggaagttcaaatgagtcaattcatgtaatgtgcttagcatggaacccggcactaaggaagtgctaatcaaatatattatgaattcttaaagaggccggttctttttttaatgtatttttgttgttgttgttgttttccatctaggctactctggctcgtttctgtaggaagtgaagcccattcttagtgcatcctagactcttccttcaggaatcctctgatgcagcttctctctgttcttagtttcctatcaggccatctagcttacctgaatctctccaatctgcagcagaccatcctggtttaagcttggtttaccttgtttttatttatttgtttacatagcatcttttcaggcatttctgggctttgttataattcccttcctaaaatattggccatctcaggaaacagtttcacctcccctaatatacattagccctcccaattttcttctatccatctatctttctgttcattcatccattcaagctatgataatcactggtttccacactccagtagttcataaatgtaatggggaagacagtacattgtgattaggagagtaatgaatttcaatttttttttttttttttttttttttgagatagagtcttgctccattgcccaggctggagtgcagtggcacagtcttggcttactgcaacctctgcctcctgggttcaagcaattctcctgcctcagcctcccaagtagctgggattacaggtgtccgccaccactcctggctaatttttgtatttttagtagagacagggtttcatcatgttggccagactggtcttgaactcctgaactcaggtgatccacccgcctcggcctcccaaagtgctgggattacaagtgtgagccaccacgccaggctatgaatttcaaaatattaaattgttatttttttcttttgtacttcattttaattaaaaacattacatttctttttctcgtaaggtgaaaggtgatcaatattaaattagataaaatgtttaaaacacctaaaagagctcctggcacatagaaaggattatcaaatgtttgaagagttattaaaaggtataaagaattatcaccgagaagaaacaggtgctctttatctatgtgttcaatgatgcacaagaaatttccaggaaacaggaggggggttggggagagatgctgtattccatactgaggaaacagcacatataatggcaaacattgaggaatgcagactaaaccacatgtgatgtttgagaactccaagtacggctagagaataaaattgcaggaggaagcagtgggctgggaggagcaggaggctgctatggtaggcaggtgtcagagaatgaaagtctctttggtggtacacccagtattgaatctggactggacccgagcagaaataattgtttccaactttgtcagtgtctactccgaaacagatggcatcttagatacctgacattcattatcctatttaaacctcaagtaaaatgcaacatagatagatatcatcccacttcattcacataaaaatcaagtcatcaactaccaaaatggtgcagtcggggttttaactaaagtccacgtgattgcaaccacactttggaagagattagactaagggggcggggggcagagtgaggagtggccctctgacatgttttaagggaaggaataatgttaaaaaattgaattttaacaatcataactgtgcagcagtgtggataatagatgaaagaaggaagagtcttacaagcagaaaagcccattaaaacgtaaagcagttgtctggtgagagatgcaggagtctaaacaaacacagtgtgaaattcaaagaaaatgctgaatctgagacctatttgggaactataactgacaacaatagcatcctcacaatgctcactgacttttcatcatgcgaaactcaagtaatcaagggtccagcagctcaccataataactggatgccaagaagaggggaagagaagaacaaagagtttttgctacaactggtaactgatcctatcaagaatattttgaggccagacacagtggctcacggccataatcccagcactttgggaggccaaggcgggcggatcatgaggtcaggagttcgaaaccagcctggccaccatggtgaaaccccatctctactaaaaatacaaaaattagctgggcatggtgacaggcacctgtaatcccagttactagaaaggctgaggcaggagaatcgtttgaacccaggaggcggaggttgcagcgagccgagattgtgccattgcactccaccctgggcaacgagcaagactgtctcaaaaaaaaaaaaagaatactttgagaatgaatttgtaaagtaacattgggctacagctcaacactgaatcaatttttgatagtgaattaggaagtaatcccagacctgaagaacataatggaattagaggcagatgaagtataaaatctcagagaggctgtagtctagggagaagatcatggtttggccacagttaatggaaaaagagaccagagtgggttagagaacctctatattctgtgcaggttgagggtttggaggcaatttccagaagttacctcatagagattctttattcaaatatttccctagaattcaggtgtgcctgacggtgtggctcaggagtgatgaatgccccttccaggacttcagcaatgattttttaaaatgcatatttggagccttaacacaagaccaggctgtgaacaatattttaatttttaatacacatttggacttgttgagagtctctgttttaataatgttgcccttttttcctctaagaacaggctgaatattccttagagagacactttggaaatcgcactatggcctgcacggcggatatctgctcttttggggttgagggaaggagcttgaatgtctctaagagcagaataggaagggaatagggttcccagatggttccagaggatgctgaacgttcactgaatgaacccctataagtatttcccctgtgctgctggtaggaaaaataccgatagagtttaaagcaaggaaggatggatggaatgtaagatggattgattcacaggtcagaaaccagatgctactgcaagtgatccctcaatgacatcatactcaacaaaacaagacaaatgttcttggtacccttccagcgcttcattgtttttcattgcctgccttaacaggatttagaatcacacggtcccagctgttaacaggtatgtaccatcacgctaccacttcaggcacatcagggaaaacatacacttggcttcctttctcagtccatacaagcattttgaacagacatgagaagagtttaagaaattgtggagggcgacacaggaccatgcctcccatgtctgacaaatggctgtgttctctgatgactagcgtgggatccatcaccctgcctcctaatccagggccttcctccagcccagctcactgcccgggtactgctgccctgtcatctctgcccttcatccctcttagaagccaatccccacttcccagtaggtggcagatacttctggtgtcctttgtacctttctcaacagccctccctgacattgcacattcaggattaggctcctgcactaatagatgacagtaacctgttattttctcagtgtggatctgtcagacttgcttgggcataaacacagttccctggtatcagcagtaccataaggtgccaggatccactgacctaagtttgctgagagatgctgaacaaaggtaaattttcctaatttgcagattgtattgtgaagtcaaattgagactattaatttggccacctttcccatcgggtaacttaggcagcttggtagctcagtgtgcatgcatcagtgagcttcttgggaaataaatcgggttagtgagttgaacaaatacttatgcaatattttctatgtgacaggcattttgctagccaggcaatcataaattagaagcccaactctattctttttttggaagaattccaatctggtaaaggaaacaaacaaccccaaaattgtaaaaagatggcagaatatcaaaagtggtagaagaaagttaaaatagcttcttttttttttttttgatagagtctcactctgtcgccaggctggagtgcagtggcaagatctcggctcactgcaaccttcacctcccaggttgaagccatcctcctgcctcagcctcccaagtagctgggatcacaggcgtgtgccaccacttctggctaatttttgttgtatttttagtagagacagggtttcaccatgttggccaggctggtctcgaactcctgacctcaagaaatccaccagcctcggcctcccaaagtgctaggattacaggtgtgagccaccaagcctggcaaaatagctttttatagtggcccttcacctccaggtgtttgcatttcagtgggattaaaggtggtactgaggcctgggccagtaggtagaggtcacctgagaacaccgggccctcccattgcccatgcctgggcaataccctgagtatttggtccttgagtagcatggaatcctctctagatttaatcactactaagccctaaaggtgggagtatatgggattcatttcgtctttgagaaaatcaaggcatgcagtgcagttcccttgaatagggagagtctggagggttgcacaaatctgaaaattattcctgctcagaggctgtatcgttctttgttgagatcaaagtccatcatgtatgccgacagcgttaattttgaagaaagccattcctcacattatctcctcacattttgcctcttcctggcaaaaaataaaaaatgttgttctgtcccttagatttgatttatttttcctctagtttattccccttcaaaccaataaacaaattcttcctacaaacagcatgagtcaccactcgtagcaaacatcctcacaggtggccgagaaaaagaaaatgtgtgtgtgtcacattcccattaaggttacagcctgagcttcgaacttcattttggcccacagcccacttgtaggtctctctgtgggcatttattaagttatgttggtctcttcaaatgtttcccaggccgggcgcggtggctcacgcctgtaatcccagcactgcaggaggctgaggcgggtggatcacctgaggtcaggagttcaagaccagcctggccaacatagtgaaaccccgtctctactaaaaatacaaaaatcagccaggtgcaggggcgcacgcctgaatcccagctactagggaggctgatgcaggagaattgcttgaacccgggaggtggagtttgcagtgagccgagattgcgccaccgcactccagcctgggtgacagaatgagactctgtctcaaaaaacacaaacaataataatcataataatatgtttcccagactccatgctctccagtcagcccttcctctctcactggcatcattttggtctggtatttccacccttcctttggaaaaatctctcttctactcagcattccccaacagcctccgtgctcagtcccaccaggacaccaaggtgggaccctgtgttaaagtgtacttcccaaggctatttgcatttgcataggcttcagagcattaaatccaaggcaatactctcaaaaggtagaagtctagatgtcagctgaaagatgaaagagactggcgagggtgaggacagagatgaagacgctaataagggcctttctgttgctggctccgtagccaggcccctcttctcaggagtaatcatgtcaactccatcatccccagtgaggtgggaatcgattttatcacacctttataattacacccttcttatatttacatgaactgcttataattatgtggatttcttgcaactctcataagctgcccaagtagggccaatctccccggtgtgggcagggagtaggcgcagagctgggctttccatcacacctgtgtgtgtccaaggccaaccttggtccattatctcatgcctggaggacatcccggagggagacgtcctttcttttgctttaatccattccttaagttaactcatctcttgctgtcctgaatgttttattgatgctaactttatttttaaagattataatctgcctgttctttttattctttctttactagaaatagattttatatatctcaggtataaggacacttcttatcatccaagataccctccttctgtattctcttctgcaaaataataccccctctatagtcccgttgccattcatcaaggttgctaatggactccctgtgaccatctgattaatgggctaatacaccttctcaaaagcaatgccttttaaacatagaaataagtaagacaataatctcacatacatttaaaaaatcttatttttatcttacagttgatttttaaatcttaaaactttgaattttaattttgtattattttgatagtgaattatattacacataaatgctttttaaatattagatgtacatttccattttacttgcttatattttataaataaaattatgtacattgtaaatattttgagaaacaaaatcacaaagtgtatcaagctagcataattgatgttgtcacagaggcgaagtgtattttcactcaccagaccataattagtaaataaatgaatactgaatgaataaacgaagcgtctcttattgtttggcactcattattttcaaatgttggctattaaagatagataatgctaggctgggtgcagtggctcacacctgtaatcccagcactttgggaggctgaggcaggcggatcacgaggtcaggagttcgagacaagactggtcaacatggcaaaaccccaactctactaaaagtacaaaaattagcaggatgtggaggcaggtgcctgtaatcccagctactcaggaggctgaggcaggagaattgcttgaaccagataagtggcagtgagcagagaccttgccattgcattccagcctggccaacatgagtaaaactccatctcaaaaacaaacaaagaaacaaaaaaacagtaccaccgggctagcaatttagaaactataatcaatgccttaatatgtcccttcttttagaaaaataactacacaaagcatctgcatgacttataagagcttccacaaatataccataaaatgttagccctgataatttgctgtgacatttaacatttcaatgggccatgtttcttagagatcactaggaaatgaagcagagcactctttgcattcatttctgctccccgagaaaacactttctctccttcactcaagccaccattcataacccagtgatgtgtgatgtcacttgtcccacagaggataatgaacaacttcccgggaaatatttccatatgactaacaatttaatgtcttagacagaaactgaatcttgcctactgtatagaagaaacaactgtgttagttcaactgcatggtacatgatgaaagtccctgttatagctattccttctaacagataattgatggggccaagagacaaaagaaggaactcactctcagaaataaacgctccacaaagcaatctcatgcctcacctaatgcaatatgtttctcatgggtcttttgttactctaacatattaaattatccttccaattaccttggcaactgaaacaagagcgcctaacacgctgatgactttcggacgagcacaccagctgtcagttataaatgataattaaggcatcttaattattaagcacagtgaaaatatgcagtgttcattttttataaaacttgtgtcctaaggtagaagaatcctcataccaaccaaatgctctttctctacctttgatcagcaatttggccttttttctctctgaggctgataaattgcagcaacctttgagatactagaccctccacccccaccccaggtcttcccccaggtctccttagttataaaggtagcagaatgtgatggttgaaagctgcatttgtaaccagcttaccttcgcaacaatagcaagagtaacaaagaatccatcctaataaaagctctgtgcacagtcagcttaagcaacgtaaagtgttcctttattctgcttagtagcttctcccccagaggttaaccattttaaagctggcactcagcctgagaacaggaacaaagcattactagaaagcagggatcttcctccaggatcagcatctctgctttccgtaattcttaagaaatatagaaactcaatgaaaaggaagtgatacctttggatgggcacattccagcacaggaaaatcgctgtcttgtcggctgctgtgcagaatgagttgcttgggcaggtattcctctattctcagctcccgggtctgccttgtagccgcagccagcctagggagcatttacggcatgtacgtggtgttcatccacaataaaaggagactaaccagctcagcttggcgctgctcgcctggaggcatcagatccttggaccctccccatctgattggctgctacccggtctagccgaactcctctgccttaaccttctgctgcgttcaatacattttccctcgggatacagtcagagaagagctggttagggaatcagtggcaggttaaattgagctggctttaaaaatcagtgacatgattttctatgaagatgtctaatgtttaattttccaaagttctacgtaatccacaaggagagacgtaataaaatggatatgatttaacaggagcggcttcatgattcctccctgaaaatacctggagtttaatgcatgcctaacaccctactgaagtgatcaggtggctttttgcagcactgcgtgtctgtataatcaaccttaaatcaaaacagatggggatgacagaatatattaagaggcttattaaaagtgccaggagatgcagttgaataaggctgctgaagccatctcaagaaagtgttataaatcatttacacaaaatgctcttaagacagttatggttgattttagatagctctgataataaaaacataaagaccaatgacagacaaaaaggtaaagcctgacttagcatctctagaagacaagtaacagaaagaaaaatcaaatcttttactctacaaaagtagtgaaatgagaaaagaacaaaagtacaccttcatcatctcctgtccatgtactggattcaatttggtcaaggacctagaacagggtattgaaaagtccccaatggggttttggtttgttttgttctttctgtttttttttgttttttgttttttgttgttgtttctttgttttgagaccgagttttgctctgttgcccaggctggagtgcagtggcgtgatctccacgcactaccccctccacctcccaggttcaagcagttctcctgcctcagcctcccgagcagctgggatcacaggcacctgccaccacacccagctaatttttgtatttttagtagagatggggtttcactatgttggccaggctggtctcgaactcctgacctcaggtgatccgcctgcctcaacctcccaaaatgctgggattacaggcgtgagccaccacacccagacagttttgttttgttttgttttgtttttaaaaatgagaggcatcaaatggaagatagtgaattgaccacatacatttaaccctttctccctcacaaagccccactaaaatgacaataaagcttttattttaagaaccataaacccacaaggacaaagaaataggagaaaacagcaacccaatttagaaaaagaaagcagatgggtgagtggtagctggacagagagagctggatcccaaatgagcaatgaggagagtcaagaagcagcagcatttccaagccagcagccccaatatgctctggaattggcagagatgaaattggggctaaaaacagcaggtggcctgactgcccatcattcaccctgcagaacacagaaggcttattctctggagagactaacagagggcttctggactggcatggctgggaataaaggtaccaaactaaaaatattgctgttaatcagaaacagatataaaaaccctgggccttctttccccactcaactcctgggagccaggtagcaaggtgaataggctccagaaaaaaagatgtgaagagcgctcttcagggatcccaccatcccaaaatataagacgtaaaggcatcactacagggtactctctaagatatggctgggctagatctcccagaagttcaggccacattaataagctctacacatgaattttggtgcccctctcttacatgtaagcagatcagacaaatctctaacatcaaagcatagaacaaaacaaacaaaaaagaaacaggcaaataacagacagacaagcaaacatggcaaaaagtaaactgatggaaacaatgggtgtgcagggagaagaacagtttaaacactatcattaatggccttgtcaaaataagagatgtatggcagttctcactctgcatggttccagtattcacaaatatcacctacacagtgtagttgatagcaccagtcttccagcaatacagttcaaatttcagttaccatggcgtgttaaccatgagtgattatgcagtatgcaaactcttttagctcttccacccacagtcactaagtaataatagatgcacaacatgatcactggccaatcacagcacttcttcaaaacctgtcagtgattggttgcggcatgcctgttagtcagctcatgtatattgttgttgttgagttgttgcaccaagtgtgttatggagttgcctccttgtctcccagtggtgcacccatgcaacatttcacaagaatggataacgaaaagagggaattcaccaacaaagatgaaagtgctgcaaagaaataaacaatttcatgggaagtgaaattggatatgattagaagattttaaaatgggaatagcaaagtttaagatttgaagagacctagctttgaataaatcatactgcagaagcctaatcaatacttttttaaaaggtaagtttctttaacatctttttaaattgcacaaaggaaagaaagcactctggttggattgaagattgtaatttttgaaaagttatttagctaatattcaggtcaaagtgttgatgttccttcccacctgaaaagaaaatggtaattacaaaagaaaggaagaagacactttttactgccagaaaaatctgttttcaaaagttggcagaaactgattaatgttaagccatcttgtgaagcttccagagcaaacggtgtcctgctatgaaatgttcacctagattccaaggactggttaaacaaggggacatgatcgttgtcaaatattctatgtgaataaaagtgtttgtgatgaaaaagatgaaaatgtcccagaggaagtgatcctggcaaaataatttacgctaaagaattcttggggccaggcacggtggctcacacctgtaatcccatcactttgggatgccaaggcaggtggatttcttgaggtcaggagtttgagaccagcctggccaacatagtgaaaccctgtctctactaaaaatacaaaagagctggacatggtggcacacacctgtaatcccagctactaaggaggctgacacaggagaatcgcttgaaccgaggaggtggaggttgcagtgagctgagatggcaccattgcactccagcctgggtgacagagtgagactgtatctcaaaataaaacaaaacagaacaaaacatctcttggagacatttcatgacattgaaagcacaaaggagaaatgatggtgggaagctgctccaaacttagaagggaggatgacaattccccaagacgtgggaaaggtgctactttagtgttttaattcacatcatgagaaggggacaagctctgttccaagaaagaaataactaattttccctgttttcaatgctttaaattacggcatactcagtaaatattagttttgttatttttattgccctatgcatttataactgatagcaagagcatttttaaagtcataggaaaattattaaaggccacagaacaattgtcattttcatcattgattattaagattgcttttcatggtttcagctacaatcctgtactaccacacaaactgaagactgactatatttttctatgaaataagcaaaagcaactgtatgaaagaaaactatggaacacaaaaagctcttggaaaattcagaagaagaattggaagacaaagttgaggaaatatccttgaaagttgagtaaaagggcaaaaaatggaaaactgtaagaaaaacggtaagaaaattggagatatagtctaggaattcaacatctggataacaggaattctagcaagaaacagttaagaaaacaaaaggaagaaaaccataaaaaataatttttaaaaagttctcatgagtttccagaatagaagtatgacgttaagacacacaattggctcatggtcgtggaatttcagcaaattaaaaataaagcactttcttggtttggtgagatagctcattcttataatttcagcattttgggaggttaaggtgggagaattacttgaggccaggagtttgagaccagcctgggcagcatagcaagatcctcatcactacaaaaaaatgaaaattaaaaaattagccaggcatggtggggcatgcttgtagtccctgctacttgggaggctgagcctagaagtttgaggctgcagttggccttaaatgaatcaagaccctgcctcttgaaaaaaaaaaaaagttctttaaacttctggaaagaaaactatgaatttcatataaaggatcaagaatttggatggtatgtttctcaataacaatactagaagctggaaggtagtggaaaaatgtctttgaagttctgagagaaaaggatttccaatttggaattccatacctagccaaaatatctctaagagtcgagatagataagacatgtttttcttggatttgaaaggtccttaaaatttccgtctcaagaaccttttctcaggagtctattgcaaaatgtgtccaccaaaacaagggaataaaacaaaaaagacaaggcttggcatccagaaaactgggatcctacaaaatgaaaagttcaaggctctgccaccctgcagaatggtcttggagacatttcagaataaagacaacgagcagatctagggagctgtcagtccagattgcatcaggtcaaaaggaggaacaatttcaggaagacaaaattgatagcatgtataatatatttgagatttttgagaaaaggcttatacaattgggagagggctctaggctgtactaattgtaagtatataaacaactgagtaacaaaaaagacaattttgttgaataggaaaacaaagtaattgtagtaaacatgattcaggcttgagtagtttttacttagccacagttataaaagtactgagtattgatacaagcaaaagtatagtatttcaaggctagctgactgcaagtgtaggtgcatggtgggtataggccgtatgattgaaagagaaataaatcctcaccttccaaagggagaagtcaatatttactgcctaaaactgaaatatcaagaagtggaaatacgaacacttagaggtgaggaagtaaatactagaagagctaattttaatatgattgcctccagcaaacaggaaatggcagaaattcctgtttttgtaattgctgaatacaactttacatgtacatccgttaactgtaatgagaataaaaattataacaaaatattaaaacttgaggtagagttgtaagtctttatgcgctaacgattaagtagagaaaatgcaagatgtataacagtgtgaaaaaagggagccatttatgttaaaaaaagaaatatttataccttttagaaagatgtacaagaaaataatctactgatgatggttgcctctgggcagcaaaattggagggtttaagatatggagatgaaacttattttttcctatataattttctatactgttacaatctttacttataaacatttttcaataaaattaacaaattttaaatgacaaaatttctaatccaagagaaaaaagtctacttttgtcatttaagtggtgatcttctacagtaaataatcttatgaatttggtcttcatattgaatttgttttctggttaaaaatattaagactttggaagcaatgaaaattagagtagtatgtcattgtaaagaagcacatataatgttacatgcataatgtcacaaacataatgtatttcaataacatatttaaattgtctattagaatttcttgcatggtcatggctgagaatttcctttgtaaaacattccttgaaaagtctccttagcacttaatatgggaggaactttttgggtaagggaggtaattttgggtctgtggaggcagaggaaaagatacggaattcagagaaagctggtagtaagatggcaaagggcctctcaccaaatcatcaataaagacacaaaatttatggaatatttgctgggaacacaatttttagagagggatgaagaggttagccttcttgtcaatgttatggaaagaatagcatcagatcatgttggaatagaatcttggaggcagagaaaggaagctccaggaacatagaaaaaatatgtggaatgctttggttggttgcaagtagaactatagttacaaccaagggctgcccaggttacttctaaattgtacatagaaactatagacatcccgaagctttaattctaatgttgttctaccatttgccaaatgaataaccctggagtaagtaatataaacatttagaatctcaaccttctcaactcagctaccacactaccaacactattttaatcaaatatttgtaaacctttaacatttttagtgtgaagcaaatctatgatatagcagtgctctttacaaaatgctttataattttctcatttctcaaactgtagttcttccacctatttcttttttatatcttaggtaagtgtaatagtttattctgtgtttgtggtaggatactttgcaaattatagaaggcaataaaaattcctagtgtctgagcattttattatttagttccagcttagtttacaagatcatctctggcttcaatggtaaaaatttgaatttcctctggaatcctctactgagtatagttaagttcactggcattctccttctggctcaccaatttcagtcactttcttgttagaggcacttcagagaaaataaaggatcttaaaatcaatactagaacattcaagaggcactatttgaaattctgaagtgataaaaaaaataaaataaaatgacattcaagagcaatatacaaatatggtcagcatatttttctccaaaataattataattatttaaaaataaatttaaaactcaatcataaatataaaagaaccagtaaagtaaaacatccttaacactttaccaccaaaatcattttatagaatttaaaaacaatgataaattttacttcttagtgacttttcaataaccaaagtcaaagttaatcaaaaatgttcaaacacacatttggtgcctgttgaggaattttgagaaaataacaatagttgattcaactgtacagatccacaggatttggcagtcacagaaaataccttgtaaattgaactttttgtttaagaaataaaataagcattctttagcatgtagagtatcttgaacttcagaacacaatctacaaggctaacttattataaaacaatcattttcacagctaatatttgtatttctatttgatcatttaattgttcatttgtttattcatcaaacattgaatacttcacattggtacccaaatttgtggattttgaggtatagaaagggaaatcagaaggaacaactagtaggaagaagatactgacccatcctgtgatcctgtagtaccatccattctgtccctcccagatgctccactgtatagaacacacccatattggagggctgtctctttaaaattacctcttcttatgtctatgtgatacatatgagcagatacttcttataaatctaatccgctttaattgggtttgccaggagtgattacagactttttcttacatctttgctttcagaaagtaattggataacttcttatgctatatggaaatgcagtagctaacaaaatggcagacttcctatttaattaaatttgtacatctccaacacaaacttgactatacagatttacagtaatgaaatctctaaagtttttaaatataagttttaactgccaattccaattccaaaaacagggatataaaagacagttttgagaattaaccaatgcgataaaaagggagcccctttccttagcacaatttctcactgtctactgtagtttcattcttttgagtctgtcattgcctttgtcttttcacttcaaagccatattcagcttcagatctcaaacacaatgcagtgggctggtgtctgcttactagagctgaaatgccttgttttggaagtgccttaacagctaaacttattggtctagatttaccaccttgacctacttcattcatttattttcatgaaaatggagacttctgatgcttattcacatgaaagcatccattagaccagagttcagataaaaataaggacgtttctgataaattgcttcattcacattagctcttctgggcaataggtaggaggaaataaaacacttatatctctacaagtaattcatgaggagcacagatgtttttacactaaaccatgttataaaatgtgataaaagtctctgataaaaataaattatcctcaacccaacttctggaggggccacaggacaactttctctttgccctctgaagggtcactgaaaatgaacagacaaaaagaagattaagccggacgcagtggctcacctctgtaatcccagcactttgggaggccgaggcgggtggatcacatcagatcaagagttcaagaccagcctggacaacatggtgaaaccccatctctactaaaaatataaaaattagctgggcgtggtggcacacgcctgtaatcccagctactcaggaggctgaggcaggagaatcgcttgaacctgggaggctgaggtttcagtgagccgagattgtgccattgcactccagcctgggcgacagagcaagactcagtctcaaaacaaaataaaaggcaaattaataggagaaaaggcacacacacatttctattttaacttgtatagcactggggaattgcagaatgattacccagtggggtacagacgcttagacacccctcttcatacaacaaatgtggcgatttgtggaacagtgaatgatttttaggggaaaatgaatggacttggagaacatacgatggcctgggacaaaacgtgttgtgactggagatcaggcaattgtttgtgacaaaagtgtacccaggggtgttgatggacttcggtctttcttcctgtgatatgagtgcagttaatgaaactcagggaaggcagttgtgttcttttggccagtctggtttctaggaagataaaggatcctcagagaacaacttcattctgttccttgggagagacaaaacattgagaaatgggggtgaggggtaggtcagagagaccttgggatcgcttcttcaatccagcatgtcaaagggccatatgttggagttcaggtttctgagacacaacacttcctgttgtagcagcagaaaaggagtgatccgtttcctccctgtcataggggtcaaaacggacacctctgaaacaaagacagattaacaagagaaaagcccaacaaatatattcgaccacagctttacaatacacaggagccttcggaatgaagacccaaaggtaccggggaaactctctgattgtgtgcccaggtttcagggagcagggacagtcatgcagaaatgtgaccggacagaaggaaatgatgtaatggtaacaggctaactagggacactcggtgaggcctgtctgttcagatcttgctcagcctctctgtgtagctttccttcctcgcaggtatccggcaggaccctttctgtaatggggggcctattacctaccattaaataagataggtcagaaaattttttctggccaattcttacacagaaaaacagccaaaagtgaaagtgcctttaggctacacgttggctttggggaaaaggaactctggtttctgtgacactcgttggggcagagagattctagttcctgcgactggcctcaggggagaatggggctgagagacaggagggtgagagaaggtcacagggaaacttcgcttctgaggctgcttctgccgtcttcactttgaagcatcatttttctgagcctcaacattcttcagtctgaaacttccccccagtagtttttttgtttgtttgttcatttgttttgagacagagtctcactctgtcgccaggctggagtgcagtggggcgatctcggctcactgcaacctctgcctccctggttcaagcgattctcctgcctcagcctcccgagtagctgggatgacaggcacccaccaccacactgggcttatttttgtatttttagtagagacggggtttcaccatgttggccaggctggtcttgaactcctaacctcaggtgattcacccacctcggcctcccaaagtgctgggattacaggtttgagccaccacgcccggcccccataggtagtttgacagtccacggatcgggttggtggattgtctcccaggct

SEQ ID NO: 428 - DNA, 184677 bp, Homo sapiens
caaggctgcagtgagttatagatggcaccacactccagcctgggtgacagagtgaggccctgtctcaaaaagtaaagaaatgccaaaactggatttttttttttttttttttttttttttgagatggagtcctgctctgtcacccaggctggagtgcagtggcgtaatctcggttcactgcaacctcttccttccgggttcaagcaattttcctgcctcagcctcccgagtagctgggattacaagcacatgccaccatgcccagctaagttttgtatttttagtagagagggggttttgccatgttggccaagctggtctcgaactcctgacctcaggtgatccgcctgacttggcttcccaaaatgttgggattacaggcgtgagccactgcgcccagccttattttaaatgtttacatttaacaaatgaacgcttttaacggacacacagaaatataattgtgccattcccaaggtaattacagtgtttataaaagaagaaccttagttcatggcatgcttcaggcagtgtggtccagaaatgggacccaagtttgaaattggatgatgagggctcctttcaaactcgtctgtctcctttggagagagttaaacctcaaggccctttgggtgtgtgtggtccaggctgagccttctccctcattccttgtgatgggcccaattgaaaggtccctcttcccctaatgcagagtggcagcccatccctgccctcttccattgcagggcagcggccagtggggagcgctgaggtgctcaggtcaggctgaccagaggggctgagcccacccttgccagcggagagcagcacaggctgatgccatcctctccctaactgtccaagccatgggctctgccttctgaactgggtcataccaaggtggggacttgggagccaggtcaggagctggcctgtcctttcggctgcccaggtttattcatggtgctggtgggtgtgtgctgttgctcttgggcacctattgtgcatttgcgtgacaggcggtgaatggaagagtgtctggggcccagagggcagaatcagagactgtccttaatcgtctttagagggaattatgtttaacaggaagtagtgagagaaagtggaaaaggcctcttccttcgcccttgctagcttggtctccttgacaagttctgctgttttctctgtgcttcagtcccctactttgtaaaatgggggcaaacatgtgacaccattgtcctcagggctgccgggaagagagtggaggcaggggtttgagtgacattcccctgtgtggacagaccacgtttcatttattcatcagttggtggaaactggattgtttccactcgtttcctattatgaattccacgtttaacttttatgaatactttcctatgaatactactgtgtttgtgtacaagtttttatgtggacacgttgtcatttctcttgggcagttacctaggactggaattgttgtaccatatggtaactgtgtttaatttttggggtaaactgccagctgttttttatgaggtggctgaaccatttcacatttccagcagcaacgtatgaaggttctagtttgtccacatccttgtcaacacttactatgatctggctttttcactgcagccatcctagtgggtgtgaagtggtagcttatggttttgattcacattttcctgatgactaattatgtttgagtatcatttcatgtgcttcttagcaatttgtgtctttttctggagaaatgtctatccaacatctttgcccctttttttgttttgttttgtttttgaaacagggtcttgctggagtgtaagtggcatggtcatggctcactgtagccttgacctcctgggctcaagggatcctcccacctcagcctccagagtagctgggactataggtgtgcaccaccacacccaactagtttttaaatttttttgatagagacaggatttccctgtgttttccaggctggtcttgaactcctgggctcaagtgaccttcccaccttggcctcccaaagtgctgaaattacaggcatgagccaccacgcttggacttttgccacatttttaaattgtgttttctttttattattgcgttgtaaatggcctttgtattttttctttaatttcttaaagatggggtctcactatgttgcccaggctggtctcaaactcctgtctttatatattctagatacaagtctcttatcagatacatgatgtgcaattattttctctcattctgtggctatcttttctctttcttaatagtgtccttggaagcacaaaaattttaaattttgactaactccagtttacttattttgttgttgcttgtatttttggtttccttttttagtctttaaaatatataagatatatgattcaaaattaaaaggcatgctcagagcagtctcgccttcatccccacctgccctctatagggaggcatttaaattaatttctccttttatcgttcctgtgtttatatttgcaaaattaaaaacctttttttcttaaacaaaggtggtatgctacagatactctgcatttctttcttcttttctttcactaaagaaatcccggaactgagcccccgtatcagccgattgaactcactgtgtttcagggccacagtagtccaggtgtggatgtgcatcaaatggtttagtcagctggttccccgctgagggcctcttgggcctgttcccagtcttttcctgtaagagatcatgcagcaggggataatatcctttcgtatagtggaggtgtgtcttcaggacagactcctaaaagtgagacggccgggtcaaaagttaagccgtaggaatcgtggctgttgccagattgtcctctgcaggggttggactgctctgtgtgtcaccagggaggtatgagagtggttccaccacaggctcacaaacagaacatattgtgaagcagtgaggttcttgccagcgttatctcagtgcagctttttttttttcaatcagctgtattgtgtgatttacatacaatgaaatacacccactttaagtgtccagtttgttgagttgtgacaaattatctacttcctgtcaccacagatgggtttttgcccttgtaggatttcatataaatgaaatatgaagtatgatgtcttctgtgttagggttgttttcttaaaaactgtatatattcaaagtgtgtaaggtatctttatatcacatagtgaaatggttactacagtcaaggaaattaacacatctgtgaactcccatagcatgtggtgagagcacctaaaatctactcttagcaaatttccagtgtacagtccagcatgattaacagtagtcctgtgctgtatatcagacctccagactattcatactacgtaactgccaccttgtacccctcgtacccttcgaccccattccccaccccttccagttgggcttccttgacccaggataaagacactgagattcatatgtgttgtcgcacccatcagtagtttaatggcttaggagtatccactgtacggatacaccacaatttctctgctttcccgttgatgatcatttgtgtggtttctagtttgtacctattctgagtaagactgctgcggacattctggctcaagtttttctgtggacatgtgttttcgtttctttggagtaaacaggagtggaatggctggatcacatggtgagcgcacacttaaacagtcactagaccttcctccaaagtggttttgccagtttccatccccactaggagcagtgtgtgggcccttcctgccccacatcctcacagacatcgggcatcgctggcctttagcttcagctctccgaggaggtggggtgcactgtctctttatggttttgatttgcatttccctgaggactgcaaactgcacgtcttttcttatttgccattatatttcctctttggtgaagtttctcttccaatcttttccccaaaaatcaagtttttgtctctttattattaagttgtaagagttctctttattttctaaatacaagttcttttaatatagagatattttctcctagtctgcaacttgccttttcattttctcagtggtatccttccaagatcagaaattttaattcttgtgaaatgcaaacccatttttttttctggttagtactttttgtgtcttaagaaacctttgcatttcctttattatgagtagggctgtgcatctttttttttctgtttaagggccatttgcttattttttctgagaactggccgtgtctttgtccactttttaaaaatttggtctattggtctttctcttcttgaattttatttatttctttgagacagggtctcactctctgttgcccaggctggagtgcagtggtgcagtcacagctcactgcggcctctacctcccaagctcacaccatcctcctatctcctgagttgctgggactacagacacatgccactatgcctggctcatttttaaaaaattattgtagagaaagggtctccttatgttgcccaggctggtcttgaactcctgggctcaagtgatcctcccgcctcagcctcccaaagtgctgggattataggcatgcctggcctctcttcttgatttctaagagctctttgtctattaccgagatgagccctttatggtatgttgttatgttttctctcagtttgcctttttgactgttttcccgtgcatattgcatgcatgtgtttttgcagagtccagtgtatccatttttttattgcttatggatttgggatcataggccttccctactcccaggctataatgagcttacccgtgtttgtatctagtattcttatggtttcattttctctaacgtttggatttttatcccatttggagttgattctaacatgcggggtaaggcatggaatcaattttatctttttccaagtgactctctacttctcttcatatcagttttttaaaaagtctatcttttcgtaatgagccgagatggcactccccaggccattatcattaaaatccttgatttccacatgttcttggacatggtcttctcgtttctgtactcgtcgtgtcctgcgggccgtctgagtgttccgtgctgacgcaccctctcctcctcgggggtttcatggcgtctccctcggcccatggtgggggcttctcaccgctcttctgttcggagggtttcctgggtgtgtctgcttcctgtttttccacatagcctagaaccagctcgcccggctccagaaaacatttgttaactttgaaaattgagactttgttaatgtattcactttgagaaagctgacatctttatggatgttgaatcgtcctatgcagaaacaaggggtgtggctctatctactccagtttacgtctttccaggagagattcttctaggactgtcgcagctgttttagaggcttcatatggattctgtacatccgatgttaggtttattcccatgtgtttagctttttcactgcttttataattttttttaaagtttttatttttatagagagagggtcttgctctattgtccaggctggtctcaaactcctggcctcaagcagtccactcgcctcagcctcccaaagtgctgggattacaggcacgagccgctgtgcccagccaatataatgggttcttttcttttcttttttttttctcgaggcagggtctcaccctgtcgcccaggctggagtatagtggtgcgatctcagctcactacaacttctacctcctgagttcaagccattctcctgcctcagcctcccaagtagctgggactacaggtgcccaccaccacgcctggctaatttttggatttttagtagagacggggtttcaccatgttggccaggctggtctcgaactcctgacctcaagtgatccacccgccttggcctcccgaagtgctgggattacaggcgtgcgccaccacgcccggcctctttcattctgttttgaactaaacattgtttgcactgcatgtggtgggttataattggttgttgtcaattttatatcttgctcttactaaatactttttcatttgtattctaaggatatcttagcacttattttattggggtttccaggtgtgctttgatattacctacaaagagatcatttttccttagggttgaatgtttttaaaggtttgtattacatattgccaaatcttttaaaaaatatggtaccaatttatacttctcttgtggcagtgttttgccatacccttgtcggcactgagtattgatattttttaaaatgtgccagtttactatgatcttcactaagaggacattcactgtgccccttctccacaccagttgcactgccaaggacacagctgcggtgaggacacagtagagcctgcagatcccagcccccagtcccactccagtccctgtccctatccccaggagtccctgttctggttatttcttgaggtttcaaatgaagatggctgctgccctctgagcccagccaatgggacgaagccagtggagagcccgtccctgccccagagattcgctctggaaaatccctgagtggttttgtaaaatgcattttacaaaataataatccccgcacaataagtcttctgggtgtctcgcaggatcccctgcacagctcaggcactgccagcagccgcatcccctcgagtggctcaatctgtccaggagcaaggggtcagccaggcaccttccagggccagtcccaggccacccagtcccagtgtggctgagcacctatgcctcttccccatagctaaaaacccagtaaaatggatgataaaatgggtaacacctccctgaaagtttctactttcctataaagcccagccccggcccaggcccgagtcctcttatgaacagaacaaccccaaccacccatttgcagagggcactgctgtttggtactgaccctgccctgcccaggctggcagccctccaaggaggctgggcaggaggtcccggaggacacggcccacaatgctcacccttttcattctccatcttgccccatcacctcccacctcggccccttcctccaggcagcccgccccgcccttttccacacacccctggttcccagcactgaagcttgcttgctgtgtgatctcaggccaattgccttacctctctgggcttgtttccatcttcacctcacaggtagatgtgaggtcacctcacaggtagatgtgaggagtgaaagagggagtattcgcagcaggtctacacagcgtgtggcacagagctggctacatgaatgtgtgttcgttgaatgggagagtgaaagaatggatggattgtgctggcaaaccctccaggggctcagtttcttccactcggaccatcagaacccagagatcagatccaggagctcctaaatgcaacctttgttagaaacacagctcccctgccctgcactgctcagtcccaccctgggggagtttccagccgcactgaggatgagctcggtggggacctgacccagagatagggacacctggtcactggaccgcagaccggcccatccacagcctggctgggctggcatctagacctcgcttggcagtcccctcccaagagctcagatagtttggcctcgggagacaggggcagtgagaaggctgcctcccctcagcctgggagctgggtcctcaggagagaggaaatttccttctatttattttcgacatcctcgactttgaaagccaagctggtgttgatatttaccttggccaggcctcccatctccccgggccagcctcgtgtaaacatgctgttccttctctcagctctgctagcactgaggtggccttttgcaaccaattctaggaatttggaagtctgaaggcgtaggttcagggactggccctccagggagccctgggtgccaggggccctgggacctgctgtgctggccttgggctctctccctgggggctgacaccaaggactgcagggaatgaatgggcctgggcccatgggggtgtcggccagggtggctcttgctgggtccctcagttctcctcacagccacgttggggcctcctgctccccaggttcactgcgaggctcagactcggaggacacgcattgagggactgtggcaggatctggctgtctccactgtctttgctccaggccacctccaccctggctggtggggagggcttgctcttgagccagctctctagtgtgagttgggagtgtgggcagctggactacagttagagggaacatggagcaggtgcccagggtgcagcctcccaaggcagcacgtgcccatgccagaattcctgccctcagggagcttgccttccagagggcaggtggaccacaaggagaacaagctggcttggggtgggggtgagtgctgcagaagccaggatgagcagaggctggctgggtcagggacggtcccccgaggtggacatgcaggaggtgagcagaggcacattccccagtgcaaatcccagccctcccctgttggttccaccaggtggttcacacactagtgacgccttggcaagtctgagatttggtttccttgtacagaaatggggtgacagtccctcagaaacaagggagtggttctgcaggtgggagctgccatgactgctgcggttttgaagcatctgtgtgccccccaccgggcagtgggacatctcggctgagcctctccccttctccatgcagatctgggacatgagcgatgatgagaccatctgagatggccccgctgtggggctgacttctccccggccgcctgctgaggagctctccatcgccagagcaggactgctgaccccaggcctggtgattctgggcccctcctccataccccgaggtctgggattcccccctctgctgcccaggagtggccagtgttcggcgttgctcgggattcaagataccaccagttcagagctaaataataaccttggccttggccttgctattgacctgggacttggtcctccatgcagtttttatttcttgtcacagtgactgatagccatcccccaggatcctttccccttggccctgagggggtgacccaacacagaccaaatggggaaatgagcaaccagctcctgcccagagccactgcgggaggtggcaccctcatccccggaatgtgctgcccaccgcaccgcaggctcctcctgtgggggccctgggcatgggtgagggtgggaccccgtgagcgcactgcaccctggccctggtggagcgggaggaggaggagagccgagctgggtacgagactaaagggcccacatgacccagtgacgccagatttccaccaaggactgagtgagctgctcagacatggctttctgcctcccagcctgtcctccactgtgggcatagcatctgtgcctgcctgcctgcttgagggagaggagtttctgctgctgccttgagctggggggaagagcccaggggcagatcctggcagctgcctggatggggctcctccctgcccttatgagcaggccaggcccagaaaggccgagcctgggctgccttcctgccccagccgagggaggggtcagacggctctaccatgggtaactcaggcaagagctggttttcctctttattctgggtgtgtgcagctgtgaggccccaacccaggagaggccatggcctaggtacctgtgaccaccctgcccccgtgtagagggcatcgtctttcctgctattttattctttcagcttttgtcttaggcccagaatcaaagtgaaaattgagtcgagctgacccttacaacagtaggatttagtagggtagatttcaaatgaggcttcgcttctcccaaagtagccagtccaagttccagtggctgtcgttcagctcatgggagcttcatggggacacagccggcacaggtgcagggcccgagtccgcccacccagcctggcgctgaaactgcacacgtacactatgtggtttaagagcactttattattgttcttaaggctacttttaagtacaaaaaaagatggcctgccaaacctttttttttcttcttccaggaaaaacaggccacagagaatggtatattacagatttacacacatgaagagaaggtcagagcgcactgcaggcagcgcggctctgggaagaacttcacggagccccttcttagagcagggagggggctttctcagtgaaatgtttggttttctgctgcctcctctgccccaggcccccctccagggtactgcctatcccagataggtcagtgcaccagggacccggccgccagcaccgccgacccctcccagagtgacgcccttgttcactgacaaagagacctgtcccaggagtgtcctccaccgagccggtcagctgtgggtggttttcctgttacgacgctcagtagcctgtagcaataacaaactcgtggctatgaatgcagatgcagtgttctcatagaataactgttcctgcacttttacagacaaatctacgacaaaaaaaaagatcaactttttttttccgaacaacaaaaaaaatgaatgattacaataggaaagggaaaaattaaatagctacatatcattaacaaattaatgttcttcaaaaaatacctacaaatttctctgtacattctttacgcacagcgtaacgatggtctcaaaatcacccatatagaaaagtgttctcaacgatttttcctacagaaaatataggggcctgaatgccaaagcttggaagcccagtacagtgggagtgaaatgtgtgcggggcaaggagaagggcttttctttcctccacttttcaaaggcctgcagccactctgtgactacaagagccagtcctccgaccttttcacccagtgccaatttccaaaattcaacagctaaaaactgtaaaaccgggggtcatacggtgtgcagagtccacaaagccttgcaggtgaggtgaccacgcccacgtcacctggtcaggtgccatcgtcgtgagcctctggtgggccaggtgggacacagcacaccccagggggaggggatagaaacgctcattgaccaaaaaggagcagctgtgacctccacagctgtgtctgtcatgcttgcttcatctaatttctagttagtagctattaatatagcaaataataaatgcagtaataacagtataaagtcagaggaatgtatactgccttggccccagcgtacgaggaagcgtataaaacaccatatcacagattgtctgtcagtaatctgctgttcagccaagagagttcaaagggagcagtttctgcatgtagggaagttggaagacacaaaccccacctcccctgggagcttgtaacaaagcagacagggatgcaaaaataaatgatgtcagcctgcagccaaactccagcatcccacaccgcagctgacccactgctcatcgcgagggcctgccaggagctggcctcccgcactacttgtgagtaaagtgaatatcaaataccaatcttagagtacaactgtaccagcagtaagtatatctaggactgtaactgacaaaaataaactaattctgaaaagaagatagtaagtattaaggtttttgtttactgtctatataattaatagaaaccagctattttttctccattaaaacatgcatcacgtttaaagcactatggaatcctccaacctcagctctagtctaacaaactgcagtgttcagagaagataaaatgcccgtgattggtagagtctgcagtccagttgcaagcacctgaaatctagagagagaaagacctataacctgtatgagacttccccttccaaagctgtattgtctacattaaaaaaaacaaaaacagtaacaacaacaaacacacaaatggtcagaaatgtcatccttaaaccctttgtttttcagcagtttgccctcagagttctggcataacacataaagttgtcaggcaactttagtcctcctccaatagtgcaaatcagacacgacagttctcttcaagtatacacacgcacacacatggaccgaaccaaacacgccgtggaagctgagccacacacaccccggtctcaagaagcaaaggaaaaagcacaaagcgtctgagtcaccaattcatcatggcttgtgactgagaaagcgctgtggagtcctggccccgtcggggcagcagacctgcatcagaggtttctttggtaactgaggcaggaagtaaggatgctacattagacagatgttccacgcgtagttcctgctatcatgtttgagggcccccttgtacggataccaagcaagtacaaaaacagaacacaaatcccaacaacatggtttttgcaaataaaccatcccttcccttccccccaccccacccccatgatttttttttttttaagtactgactgttcaaagctcaggcaaaccatgcagatccacgtgttgttggaggaggcgctcccttcaggagaccacagagggggagtgactgtggctgaccatgtgggcagaggggctggcgggctggcccctgcgagaggcggactcagggctgctggatgctccgtccttggccgctttgatctggagccacgtgtcacccagagctttggcaaagtggtcgtccacggagcccgtgatggacacggagttgggtgccggctcgggctccttgtaattcttgcccaggctcctgcggaaatgctcctccaccacggggtcacaggtggtggcagctgcaggcaagcaggaaggcaggcagtcagacacaggtggctgcagacagacaggcacggttgcagcaccctccctcaggcagcccagagccggactggctgccacggtcagcgtgggctctgcagacagaacccacctcccccggctaagtcaggcacttgggcaggtcacttttctgtaaaatggtgatgtaccaactgcactgggccagagtccgagttcagaaagagaatgtggcattaaatttaaataacagtagccgctgccctccctgcaactagggcatgagaccctggaactgagcgaggcggtgtgtttctcatgcccttcccacccaagtcatgcgcaacgctaggcgcacactggacgtgctcaagaaatactttttcaacctcagcaatagatgggctcaggggcgagaggtttcagccaacagcatgacagagaagggctctgctgccactagcacagctgtgacaggtgaggaggcccgggacactcaccgctcggtggcctccggtagctggcaggcccgggcgcggcacagccgctgtgcgcgatggggcagtgcgagaggttgcagttgcgggcgccagccgaggcacaggtgatcacggagggccggttctgcggggaggaggggtgtcagtatgtggagaccagcttcagtaccgggcaccacccctggggccctccccagcacccttcaggctctgtcctggtgcccttcctgacccagtctgccacctcccacttcaatactggagtcctgttgctaaacacagccaatccacagagtgagcgcagctccaagggtgtgtgtagtggcccttggtcgtggctgtttggatcagtgagggtacaaaggacaaaagctcaactgttgagttggtctgtccccatctctcaaatctgttaagacaaacaccgggcatcctgtggaggacagagggttgcaggagggacctcgattctcccgttaacgtccccagagcccttcccatcatgtccactgagccgcgggtgtgcctggagccatccaggacacttcaatacacggcaattaactggaagcattttgcttgagccaaagccagctcgagttggcctcagtgatgacctacaaatcgggacagagaggaaatggaggaaatatgcctaagtgtggaacggcacacatcccaccccagcccgatctgccctgtgcacagcctcactctctccttcacccccacccccacgctgtctgcctggcaaactccccttgttccttcaagccctgttcagatctctctctgaagcctttcactggccaccgccccaccaccaccgcttttcactcctgctcccctaacccaccaagattcagcaagtgcatcggtctgtccaggtgctcccgtaagaccatgcacaccaggcagtatgtctggccccccagctttggtgtggaacctgggacagaaaatatttgtgaactaaacagaacttcctcaggttcccccaggaaaagtatcttccaatacccccgaggacaaggtggtggagtatgtgggctaagttccaggacagccagcaaggagctggttgaaatcaccccacagggaccaatggtgacagcagtgtcagccagagggacgctgggccttatcctccccagccagccctttccattaaagttagagcagtagctggtataaagacacaaaaggcttgcatgccagaccttctcatgatagacgacagtgattgggaatggtgaaagtggattctaggatgaaaatgtggatccacaaggatgaactgggattgaacacaaggacctgtgcttgggtctaacaagaagcgacacatgccagggtagggggggatgtggcttagcaacagcagaccaaccaagaattcagggtttcttagtggcccgacacttagcagcgggacagagctgcccagggttcgtacggcctccatggtgtgcacaggtggcagcgcagagagaacccgggcaggtggagctgggctgaatgtccacgttctgcctgtggacagggcctcgggtgagagacttcacaatgctgagcagacaggctcggaaagggggttggggaccgacagatgaggcctggagcagatctcacactggctgaccacaggggtcaagcagcagcaagagagcagaataccgagacctggacacgcacagagccaggaggaaggagggccctgcccctgtccagctctcagagatggccaggcccttcctgagcctggctgcacccatgaccttgggctctaggagacccccccccagggtcctcccaataaaactcccttttgtgctcagccggcttgttctttgcagcgagcgtgtcctgacccacgcaaatgtggggaactggggagacatttcgagcacagggagggggaatcaaggaagatgaagaaatgagctcactgtccagcctttatgtcagtctatccaaggcaggaaaggccacttcagaagagactctctaacaagggaccagcagggcaggctggctgactggtatcagaccaccttcagggcatctcctgacctgagctggggcgaattgccttaaccggtcacctgcagatgtgaagatgttcagtgtctgggcatcctctcctcctccccacaacccaggctgcagggtggcccgtgagccctcgtgggactggctccaccacccctcctccccagctggagtcaggcatcttgcccctgcctctgtggttgagtgcaggctgggactcgtccacctagaacgggccccaggcctccagatggtgagcgtttatgggatcccgaggctcccctcccccacacccttattttccagatggggaaaatgaaggccagaaacaccctgttggaagttacgctgcggatttgtggcagggccagtatgagccctgtcactaaccccttcacccgctgtcccacccacctgtgactgtcctcagacagaggctgccccgggggagagggctcccaccacctctcctatctgaaagcaacccccaaggctggctgcgccaaactttttttttttttttttttttttttaaagacaaagtctcactctgtcgtccaggctggagtgcagtgacgcgatcttggctcattgcaagctccgccttccgggttcaagcgattctcctgtcagcctcccgagtagctgggattacaggcacccaccaccacgcctggctaatttttgtacttttagtaaaaacagggtttcaccatgttggccaggctggtctcgaaatcctggcctcaagtgatccgccgcctcaaccccccaaagggctgggattacaggtgtgagccactgtgcccagccctcaatgtgcgaagcttaaccccatcttgcctctcctcactggctgctgcccaaggccaccctcttggtgtttgtctgtcctgagctgctatcacaaacatgaaatggggggacactttctgtagcctccccatacatgcccctctgggaactttcctgtcccagttcccagagatctgagacacattttctgccacacagaggaaggcttccaccgtgcccaccccacagggctgcagcatgcgtcctgcctgcctgtggacacagagctttgctgtcaccccaggaagccccctccccactgccatttccctggctctgagctgcaggatgacacccaacagacttccaggaagagacctcggagctgctggagcacaggcaacgtggctgcttggtgtcctcagcagggcgcccgagcccagctcggattggtgtgcatggcctcagccccgccacgctgccgcaggaaggagccccacgaatggttacgacatgaatgacatgtgctgacagcagccacggcaaggagggcaggactgaccaaccccagccgaaaatgacagctccggtcagggccactgtgcccttcccaggaaaatgggcagcttggggtaccccgtggcccctggctttgtcctcagtccaggccaggatcccataaagatatagctggggggtcgaggttcttcctcctaggaaagctgctcaggagccccaaggcacaaggaggggcccttgccacgtgtgccgtgggcagccaggcccattccaggctggggagagggagacagggtaaagagagtcaggccactctgttcagcagttcagtttttgcaaagcaactgtgaccgaaaaccaactgcaagattctcaagagccctgaagagtcaaggaaataaatcatccaagaacacactaagcccgccaagggcccaccctgaccatgtgggcagagatagcttgtaaggctcacagttatgtcccccaggtcatcaagggccagaggctggatgtgggtgctccgagattacagctgaatcctcccctccatacccgtgtccttcagggactccccaacagcagtggcaatggccagagagccaggttctgcctgcacggttcaggccatggctcatggcagcattacaatgcctgttgagcttcccaaagcagaaaggtccactgcccaccccggggagcagtgagcgggtccctgtgggtcgcactgcgcacacgcctctgttccagcccctgctgctgcccaacagcacaatcctctcttctcatgtccatttccccaattagactgggagctccctgtggccgtgacagtgtccacacacacgtctctggctgcccacagctctgctctgcagagggctgggtaaatggtgagcgctcgtaaaacgttgaaatgaacagcagtgataacttggcctcgggttccatcagacacatcagcgatctctcctccagactaaaactgagcgtgctgagaacaaaaactgcatcttgcttgactggcttctggtaccccctggcacacagcaggggtctgtgccattttgttaaatggatgaatcaaacaaacaggattaccatgtcaggctctgaggcaagatgggcaactgttctcagcttcaccaggattcccaagcaccagaaccacctctcccaactcccagggcctaccccacccacagtttcaacagaccccatcagacacggacaccaggcagtgccacttggagggaagccccggtgaggccacagggacacagaggctcttgcagctgaatgcacagagcccggaggcaccccctcggggcacggcaccatcctctctgtcagtcttagcaaatgctgactactgactaaggacctattaggtcgcagtccctggagattcggagagctcaagcagtaattttgagcctcctcaatgctgctgccttctcccatatatttccccaggaaccccatttttaaaaagatttgtttctaccaagcaagctgtgtttattaagcaatcatttaatttcctattttcctttcatagaaaaaaatccctatgtaccaatcataggcttctgaccagcatgggctcacaaccctgtgaccatcaactgtgcaggaccccagcccaaggcaaagcaacctgacatttcccttcatccgcgtgaccgtctaaaggagaaacgtaggacccccccacccgaggatgactacattcatcctaagagaatcaggcctgccacagaagactgctggaggaaacacctcagtacaccacccctgtactgggagaggaaagagatgaagccccagtgacattcaccttgcccaaggccgtgagtgctaagaggcaaggcccgggcaggtctgggcaggaagtaaaagcagaagaggactcctgttctgctgtcccttgtcccaagtgcacaacagaggcgaagggtggcatccctcaccacctccctccctcaccacctccctccctcaccaccgccctcggagtcctctgctcggggctctccatccagcccagtcccccagcccctggactccccacgccaccctcccagacagaggcccacctgctgccgctcccccggggtcagtgtgggcgagaggccggctggcctgctggcgtccaggctgttcttggtcagtgcgaggggctgctccaggccaaggctggggagggaggtgtacaggtggctgccgtgcaggctcatggtgggggccacagcgcgctcgatggggctgcggctccgctcccgggggtctctgcggcagtctccattggcagtcttgttcctgaaaaagaggaatgggcattcagggggcgttttctcaaaggcaaaggggacagtgactgtgcgccaggcactccgtgttgcttatttaattttttaccctgaagctcaggtcgtgtggctgggcagcacgatgaggagccggttgccagcccgggtcagccggacaccaaagcctctgggtgccggagaagctgctgccagcggagtccaaagtcagctccatagaagatggagcccccgactcagtggcgtcctctgcctgactctgtgttcacttctataataatctccactccctgggagcctggggagctggaggccaagctggttcgataaggacctgccatttggacaggacggggacgctgacaacgatccagagtcactggctgcgtcctacatgcagggccctattcaaagcctccacagcactgctcagcccatcttcctcacagtactgctcagcccgtcttcctaacagcactaagcaggcaatgctgccaccatcccctttccagaccagaaccccaagactcaagagtggtggaataatcagctcagactcccagctgacatgtggtggcacgtgctctggggttcccggggtgctgtagggagccggcgcgcagctctctcgtccaggacacacgagcaggagtgacctgcgtccagaaggtccatcactagccctggccatgtgctgagcacccaggcgatgccacgtggaatccaggtgagacagtcagcaccacctccatctgatgtgttagtctgaaggcagcgttacgtgttgcatctattagacaccaaccccacacaggtaagccatggccagccctggtccaccctccctgctttattccaggggtcccacagttccatctgccttgggtcttgccccttcaatccaccatattatccgctgacagagtaacctttttccgtaactcatgagctggtcatttaaagaaaaaggtggtgaattatgatttgagtgaattttaagaaatacaaattattttcagagtctacaagtagtcacctgtcttaactagcagaaaagcctaggcctgccctggtgaagcagcagccacagcccccgtcccggactggctgaatatgttacacacacaatgaatgttacacacacaatgttacgcatgcacacagaatgttacacacacactgaatgttacacacacgcacaccacacacacacacgcatgtgataggcgtacctttctaaaactgtagattaacttcagttgtaagaaacaacacacggccatcccatgcaccctttaccttgactcccgcgatggtgacatcttgtaaaactacagtacaatatcacaaccaggatatcgacaatgagacaactaccaaccttattcagatttcgtgttttgcttgtatccattccagagcaatctctttataaggcaaatccaaccacatccagcccttagtgaatgtttttagcagctcagcacgggccttggtagcctctgggcctgaccaccttcccgtcctcatctctggcttcacgcctccaaatgttgtgttccgtagttccaaccatctacttgccattcctcaaataagatgcggccactctctgcctctgtggctgtgtacacgcggtgccgctctagcctccctcctccccgtcctgcgctgccaaccacagctgcagtgtagaatcccaaggcgccccgtgcaaacctttaatacagaatccatcccccaccgtcaatgatctcttcgtctacgcacccgcccctcctcacacacggcagcctctgagggcgtcgagtccctcctgtctcattacgcttgctaccaggggtgcacagagacttaacgggtgaatgaagagaagcagcatatgggtgaccgtgtaagaaaggcaggtatcgtggagtggaactgtgggtgggcagaatcatggagagctggagggctgaggagtcaactggaggcgcattcaagcctttagatggaccctgcggcccagtcggtgagctgctaagggctgagcaggagaagcaccagagggggcctgagtgcagcctcggctgtgatgttgtgatgtcattctgcgccatctccagcaggggcacgcgctcagcttagtgacccgaggcgttccgagcctcggcgtccccatgtaaccatgtggtcacagtaagatccacccagaggactctaaatgggggacaaacagcacacaaacaaaaacaatcagagcggcgcagtgcagccctcagtgagcgccaagagaaccctgtcagccctaaaccgagtatattgattatagggtgattagctgtacaggacccagtattcgtttatggggtttttttcttcccctttattttctggctgatgatacagaatatcttaaaagcaattaaggattaaatgttcagcccattaagacaatcatggaagagaatgttctggcagagtctagatagtaggttccatccacgccacacacatcctggcgattttcaaaacgttaaaatactaaaaaccttaatactgaaaccagcctgtccataatgtcatctgtctgtggcgattcagaagacagcacaggtttctgcaatgaatgcctcaagggttatgatcccagacaccgatgtcaccagaagaccttccgcggaacggacgtcaggccaagcagtcctgagatctgctggcttctacctaaacgggacttggttcctgaatactcagttcatcagtgtcaccacacatcctcatcttcagtgtcccgctcccttctaaattcagataaagatacaattttattgttaacaacatgagtgaatggcttctctccaccccaggtgatgcttccacgggccacttcatgaagtgcatagacctgggggctcatgtcccagattcaggagagcctcagacacagtctgcctccgaatttagacgtctgtttactcaaccagcgctagttaagtccctgttctgtggaggttccagaactgcagggttacagccctgccttctcatgggcttacaatctagcagggacagaaaggcccgggaggggctgcagctcccaagtgacagctctggatccgggcaaggataaagacacccccgggtggcatggaggagcagactaaaggtcaggcgtctgcccatgtccaaagccaaagtcgtggtacataaggcactgcccacccctcgcaccttatgtcctaggggcacggcacagtcacgcagatgactcagctgcgccttaggaaatccaagcatgactatgagaccacatcacagaggaaaggggtgccagggccgccagctgccagggcagaggtaaggacggggcagccctgcacctaaatctgccatctatgctcccacagccccactgtgcgcccaccctacgcagggcagcagggagaaggggacttccaggcccactaactggaaagacagtccgtggaacacagcacagtgggcactatgggtcagacaaagacactgaaaacagcgagaaaaggcctggagaactggctggttaattttagtaaaattatacattactcacatttccagctcattttcctggttcccggagcttcaagacagacattgttttccaggccccgctcgcccggatgaatcacctcccggccactgcttcccaggcgtcatgtgctcccggggacggcagaaaaccgcacgcatcctgcccgggagatggaagtcgcctccgctcctggtcaggactgtgcccgagagagcccacggcatccccgcgaacacccaaaggactctgagtggctccgtgccaggcctatcagagccgctgaggctgcacggcacccggccccgccccgggcctcatccccatcctaggcgggcacttccactgccagctgcccacggagagaaagatggaaagaggagggagggaaagagaggcctacaacaccatcatccaggacagagctttctgagtactgaaagccacacgctctctaagctaagaaaccaagaatgtccataacatctggggaaaagtaaaccagattccaagcagtgacattgaaagaatccatcacgtgaaagaagtgcactgcgtctatttgatactcattaaaatgagtttcccaccctccaacaaacgtgctttgggatgcttagcccttagccccatcacctgacgttctgagcctgcgctgggcttcattcaccgtggactgccacaagctacactgatctgagtctgagttcctctgcctggggagggggtatgggtacaagacattttgaggatacattctggggtccccaaaggcccctgagcaccatggcatggcaggtgctcccacccagtgaaagagatgaggcccagggcagccttgggccctggcctcccaaaaaccaacatcctgaggcggcaaagcagcccgtccccatgccaggcgttgcctggcaggagtagaatgaaggctatgcagagacatcccccaagcaccagagtccaggtggagacaagagattcaaaggaggaggggccggcacagggccagtgagtgggccgggacacagccccatctccagccctttcgtcctctctctcccaccgcagcagttacaggagaatccgacatctgagaactggcaggacagccagtcgttcacacagtcttaacacatcataatgagactgctggctgggcatggtgacgtgcacctgtggtcccagctacttggaggctgaagtgggaggatcacctgggcccaggaggtggaggctacagtgagccatggtcacgccactgcactttagcctgggtgacagagcaagaccctgtctttaaataaataagattgctagcacatctttaatcttaaaaagcttcctcagaaaacagacttaatgccactgaagggtgccctgaaacctggttaaagtggtcagctgtatgctctgctaatttactacagctttttaaataataaaattttacctgaataatatagacagaacttcctcccaacctttacctgctgccccctggggtttctgatgtgcacagggcaggtcagcaccatcccagttttacagaagagatgaccaaggtggagaagatgaaggctttgcctagacatgctgcccaccacagacaccggccctgtggcatcagccgctcagggtcgtcacaccaggcccaccaagagactctccatcacctcgcagctccatcccaagctgccaggaggcctttccgacccaccagcaccatttccacccaccttcctgccccaactgcagagacacaggaaaggagcagtgcggagatgccggccaccaaggtctgtccccggacagtcctgccacgctggctttctcagtcagtaagcttctgaagcacagctcccaggggaccccggtccctggctggaccgtgcactcccgggaaggctgacactgcagcccccacgccctaatctccttggctccgcacgggtgaccacataccagatgttctaataactgtccatagagtaaataaatcattaaggtacacatagtatgtgtgagtccagttaacagcgtttgtggcaaatgacaagggagttaaggagatttcagagaaaatgactggtggcaaagacttttttctgaaaaagcaaaatttaaggaacatttaaatgttgggcataaacagtggtgagatgtcttctcccttttagtcccttcctccaacttctgttgtcctcctcacctcctccctgcttctaaatgtccccgagctcatccaaagcaccccacaacacacacacaggagtgaactcatcaccgtggcttctctccccttgtgagtgggagaattcactgcttcccagtgagcaacaaggtgcctgggtgtgtccccaagacatcctggtcaagctgcgtcactcctctgtgccaattttagacgggaagtgagggaagtggttgcaaaggaaggcctgggtgaagacgatgtttgccgaggtggcggaggctgaggcagagacaccctcctaagtacaaatggcaagaagtgtgtcgtgggcaggaaaaagctggcaaaataccggcattcggactgtcccaaagacagagatgaccctgaggctcctggcttcaatagcggggtccatcctcgctggcagggacacagggcagagactgtctctgccttctatgcgtcagcaactactgccatagcttaacattgcttaataattgaaaaaaagccaccaaaaagtcaagggaatgaaacccgagtgcgaatgccgccacagccagcatcactgccacaaccatccacccacgtaatgtttcccccattaactctccataaaggggccaggtgcagtgactcacgcctgtaatcccagcactttgggaggccaacgtaggtggactgcttaggcccaggagttcgagaccagcctgggcaacatggcaaaaccccgtctctacaaaaaatacaaaaattagctgggcatggtagcgcctgtaatcccagctactcaggaggatggctggagcccagtaagttaaggctacagtgagccatgacagagccactgcactccagcctgggcaacagggtaagaccctgtctcaggaaataaaaataaaatactccccacaaaggtagtgtccctctttttgctggttcagatttcagaaatcaactccatggacccggcaacacaggactcatttgctccatctattgcgagacagctgtggcttgcggtcccagcgtgagaagcctattggccgggcacagtggctcacacctgtaatctcatcactttgggaggccgaggccggcagatggctttagcctaggaattcaagaccagcctgggaaacatggcaaaaccctgtctctactaaaaatacaaaaattatctgggcgtggtgtcacgtacctgcagccccagctactctggaggctgaggtgggaggatcacctgagcccaggagatggaggttgcagtgagctgagatctgcaccactgtattccagcctgagtgacagagtgagaccctgtctcaaaaaaaaagttggggaatctctgagtaagtgattgacgttgagtatctttattatcatcagctctcatttattgaaggacatgcccaatcatatgctagacctcatcttagtaaattcactgccccactgcaaaataagcatcatctccattttacaaataagtaaactgagcttgagagaggctaagtaacttttctaagtttacaaaactagtacaacgattccaatatatattggactggctccaaagcctttccattttccgggagggaggaaaatacaaagactcgtgtacctaccactcagaactagcaaatgaaaatgtgctctcatatttgcttcgggccttttctttcctctggccatgatgaaagcagcagaacatgcagacgcatgaggtccctgctccaggccctcctcagtcccattcccctctcttcgtcccctggggcatcctctgttttgtatttggtgcctcctgctacctgactgtcgtcctcttgccacacgtggatgtgtccggaagcacacatccgtcgcatgcttcacactccagcatgccagcacactgtatgtcttgttgtacaaccgtgtctttccctcatgttggtcttggagctctacccatgttccaacacagagacctggcttatccatgttatttgcctgctctgtggtattcttccatacgaatacaccactgcatatgtacccgttcctttatggaccggcgcctgggcactctttggtttttccttctgaaaatgacccccgtaggccaggcgcagtggctcacacctgtaattccagcactttgggaggccgagacaggtggatcacctgaggtcaggagtttgagaccggcctgaccaacatggcgaatccccctctactaaaaatacaaaaattagctgggcttggtggtgggcgcctgtaatcccagctactccagaggctgagggaggagaatcggctgaacccgggaggcggaggttgcagtgagccaagatcgagccattgcactccaacctgggtgacagggcaagactccgtctcaagaaagaaagacagacagacagacagaaagaaagaaaagaagagagagagagaaagacagacagaaagaaaagaaatagagaaagaaagaaagaaagaaagaaagaaagaaagaaagaaagaaagaaagaaagaaagaaaggaaggaaggaagaaagaaagaaagaaagaaagaaagaaagaaagaaagaaagaaagaaagaaagaaagaaagaaagaaagaaagaaagaaaatggccccatagtgcttaagtcctcagacatgtgtcctggtgctggggacagggcttctgacattctctcaggtcagtatttgcaggtcatccaccttcgacttcaacacatgtgaccagaaaccttcccaaggcagccatccactttgctgtccctccgacggccatggctgaccactgctgctgctgtgtatcctcggtgacatctggccttggcagcctatggatttctgccattctcctggcatgaaatcactccttcttgttgttttaatttgcatttcttcagttaccagcgcagttgagcatcttttcatacacttactgaccattctactttatgctgtgaactgcctttaatttctgtaatgggttgaactgtgtccccctgaaaagacattgaagtcctaaccccctaggttctctgaatgtgagcttatctgaaatagggtctttaccgaagaccaagtaagctgtggttatgagggcgtgctctaatccaatgtgactggtgtcctattagaaaacactggaaatctggatacagtgacagacacatacggagggaagaagatgtgaagacagagagaagaccgtcatcaacaagccatggaatgccagaggccaccagcagctgagagaaaggcctgcacagacgctccccacagccctcagaagcagccagccctgctgacaccttgatctcaggcaccaggaacggtgagacaatacgtttttcttaccctaagccaccccatctgtggccctgtgttatggcagccctaggaaacgaacacaattccctaggccgtacccacccgctgccttgctttacacggctttagatatttgccacacccatgtttcttctgctttatctatgatcaacctaaaagtttttaaagcttcctctggacatttaaagagaggtcctgagatccactgggcctcggtcacctgtcctgtatgcctgtcatcctgaggcactgcacgagcaccgcacaatgacagtccaaacagagaccagagctgggcaggccaagtcagcccagacctgccagtaagaagctgagagttccagaggctgggaagggtagggagaaggtaggggctggagagatttgctaaaggatacaaaattacagccaggtaggaagagtaagttccagcactatggtcacctagaccactgtagggtgactgcagttaacaataatacactacacagtttcaaacaacatccatatattggatgttcccagcacaaagaaacgattaatgtttgatggaggctaaccaccctgagctcatcactctacatgacacatgtcgaaacttcactatgtaccccatgaatatgtacaattactgtcaattcaactatatatgtgtgtgtgtgtgtgtgtgtgtgtgtgtgtgtgtgtgtgtgtgtgtgtgtgtattttaaaagctggagggctagctgcccccaaatatggttcaggaagccaggaaaaagagccccatcttatgcgcctacatacaaaagggaagaagcttgtcggccgagttaccatccaaaacccttttggcttggtagtgtttggggaggatgaaagaataaagccgcagatcttttcattactcctgcatctcctcctctctcttcttcaacgctcgtgccaaccccccattcccactttacaccgaggaaaagtggattgagaggtggagggatctgcctggggccatgtggctggcaggtggcagagtagggacttgggtccttgctcccctgctgccaatgcccggagggtttcaaaagcagctcaggtctgtggtgcgagagggaaggcggccgcactgagtgctgtcagagcaaacgggcgtccattctgctgctctcctgtcagtgtggactctgtctctctaactgcgccaagggtttccagtcactgtgctctcaagagtgacagtcattaaatcagcatagccagcatctccacatgctccagccttcgagtttcttttgactccctccagcagctcagctggaatgtgcatcgtgtgtgagtctgcccctctctctccttgagactggaaggagctccgagggcaaagtgggtccctcctttccttgggcacaatcggtcctcagatctgtgcaagggacggaagacacttgggaaacctggcggatccggaaccacagtgtgcacttacccagcggcagccgcttaaagaaagatcccagacaccagccttaggagagaaactctaagtgattttagttagagacctgtcggaaacgctgctgctggaagtctccatctttccattctccctatggtggcccaaaaagccaggtggctggtttggctagaatgaggcgtaaagtcagagcaaacaggttctgagtgagtctggggccaacccctgcaactttcccatatccaattccagcattcagagaccctctttgcttggcaatgtgtgcaggctttccagacccgttgcctctagagaggcgggactcacggaaatgctggccagcagcgcggagcccgtccaggttgcccagatcctcaggtcacgtttctgaatagctcaactctatgtaaataaggtaccagttttctttaaccagaactgtctacatgtgttttccattattagctttagttttttaagaaaaactgatgtttgagaaacaggtcatggctgagaacatgaccggtaaagcatctcacctgcccccacgttagcaactgttgccagggaagtagttgtgagagcacagccagcagtggatgcccacctgcggccatgacccccagaacttaattcagatggggcaggaatccatgtgcatgctaagcactgtttacaggcaaaacagatgtgtcccacattagagttttcaaatgaatggagatgttgctgagattaataaaattgaaaagaatttaaaattcctactgctaatttgtagttgtttttgtcattatgtaatctctcaaggaatatgttaaaaatacaaccactatcatatttttgacattaaatagagtccttgtatcacagaagggatgaaaaacactctatctttccttcctcactgagctgcagtgtctgaggtggacaaaaccctgggagacacggcgatctctgcacagcagcagaggcatcagcatgtcggcatcctgccttgccatcctccggggactacttgagacagctgaggcgaggactagagggaggggtgaagaaaaggcatttgaccactaagaccatccagtgctagtcaacccagacgtcctgttctccctgctgcttcactccaccccacaccctcaatctgactctgagctccgctggaaaggcctttcctgtgctggaaaagtggagggcaggacccactgcctccgatgcccgcctcaggaaggcagagggtggagagagagcccatccaccaactcaagactaggagagaagacacattccctctagacacccctggagggaaacgggaacagtgtctgctcggtaggctgctcagaagtgtctgcaagtcactgtctagaacagggcctggcacacaactattttatgaatgagccaaccgaaaactaaacaaattctcaggagaaaccagcagcaacaggttagagtcagacagaggagctcatgaagctgggtgacccagggctgggccatccatggccctggggctcctggggaaacccaaggagaacagccctggccagcgccaaccccctagaaacgagtggtctgaggagaccttctgccattccctctctcgttcttgcgactggcactgtcatctttcaaaatttcaaattcttttgaaggctcactcttagtttttactccatattatgcagcaaattgctggaaaatattataaaactgtttagtggccaggtgtggtggctcacgcctgtaatctcaactttgggaggctgaggcgggcagatcacttgaggccaggagttcaagaccagcctggcatggtgaaaccccgtctttacaaaaaatacaaaaattagccaagtgtggtggtgcatgcctgtagtcccagctactcgggaggctgaggcaagagaatcgctggaacgtgggaggcagaggctgcagtgagccgagatcatgccactgcactccagtctgaacaacagagcaagaccccaccccccaaaaaaactgtacactggaaagattggatgctttgtccaactcaggagaacacttcacactaaaatggttttaacaggagagagatgtggaatcccagcctccctcaaggagcaccacacagctgctgcttaaacactatccagacagctgcctacctccttcctaaaggttctccctcctaatgaatgaactctgccttcaaatacaattctttggtcccaggtctgccctttggaaaaattcaatgaatcttatttcctcgtccaactactgaaaaggacttctatgtcaaccttgccatgcccagaattctccttcaaattactctgacacaagactccttatccaacctgtcacccacagggcacatgccacaagtgaacattcatatttaagagggtcacactccagaagcagcctaaggaaatagggcacacaggcaaggactcactcccttccatttatcgtagcacgtttctgaacgaaacaccagcgtagacagtctaataaaaactaacctaaagcatcaggattattccaagacctgcagtcaccagtactatcctttcatcaaaacaacccaagatgccagtaggcacttccacacccatgttgcacagtgtggtcacataaaagtctccaatccttttcttcccattatttcagctttgtgaccccatactggctaaagaccagacatgaatgagtgcgtgcaggcatatgagagacaaataatcagacttcctttctgcgtcacgtggtgtgtggcagtctcctcctccccacacaccggagcatggtcacaactgcctgaatgccagccgccttcccatggtccagccctaaggttggtaggaaccagttcgaaattattttgtggacttctccgtactacaggaagacctctggttcaataaatttattcagcactaaataaaaatatcaaacctgattttcctcttaaagttaccgatctaccctgactgaactcagaaactctgcaaaaaaaaaaaaagtaataataataaataaataaaccccaaaactattgagctaaattattatacacccattgaaaatttgagtattgagtatacgaagtgattaaatgctcatctagtaagagattttgaggcatctactgtatattttctttttttttttttttttttgagatggagtctcgctctgtcacccaggctggagtgcagtggcgtgatctctgctcatcgcaagctccacctcccaggttcacgccattctcctgcctcagcctcccaagtagctgggactacaagcgcccgccaccacgcccggctaatttttgtatttttagtagagacggggtttcatcgtgttagccaggatggtctcaatttcctgacctcatgatccgcccgcctcagcctcccaaagtgctgggattacaggcgtgagccactgcacctggcctctactgtatattctttaaagtactaatagaccgtaaggaccttcctcctgagagccaatcatgtagtgtgttaattctcaacatgaactgcctctgagcatccaggtagtcagggctacgctccatctttccaaaactagggggaaagggttggccaagctaactttctaaaaaaaaaaaaaaaaaccagactgctttacagaaacaagatttacattacttaaagaaaaaattattttgaggacctccaggtacttagcaaggctactgctttactgacaatggacaccctaatgacaaataaagcagagttcccacgggaaaaaaacagtactgagagcctatttcattgatctgagttataaaactgcatttcttttaaaatagtctcattttcaaattctgcaaaaacttcagaactaagctatctctggagcttcactgtaacatcactcacatctagatgcaaccccctggctataaaatcatatttcacccagaagtgttcgtctgtggagtgtgcagtgtggaagactgaaaagaacgtggggggagttcaatcattccattcaacactgaagtggcatctcttcccccaaactcgtgagttgatgattcaaataatgcctccagagaattcagaagcaccctcccccccaagtttcatgcaccccaagtttcatgcacctttcctttgtacgagggcttccaaaccagatggtaatggtgactcttcactactctttgaattaaattaaaattaccacccccggtggtcatcacgcatcacatctgtcgattattaggcaccaaatactgtattcctggagctcggtctgccctccaagctgcctgactctccttcacagcctcagtcaccccagatgagtatggaatataaaggattcacacacaatggactcattaatgtttattcagttgacctgaagttggtcatcacagtttttcatattttttttactatggtaaagtactacatacataaaattcaccacttttcagtgacaataagtacactggtatgttgtgccgccaaccgcaccatccgtctccagaactttttcctcttcccaaactctgcactcattaaacaccaacctcccatttcctccttcttgcagccgctggaactaccattctaccttctaggactttcactactctaggaacctcatgtcagtggaatcatacaacatttgtctttccatgactggcttacacaaggtgcatctgtgtggtagcatgggtccgaatctccttcctttttaaggctgagtaatattccattgtgtgtacagaccacatttggtttttccattcatccggtgatgagcacttgggttgtttccaacttttggctattgtgaataatgctgctatgaacatgggtgtgcaagtatccgttcaagtctctgctttcagttatttcgtgtgtatacctataagcagaattgctgcatcatatgataattctgtttaatgttcaacacatcattggtagtaaaggaggtgggaagtataggatgcatttttcatttaacgtttggccctctctactagagaaaaattaaaggtttccaaaaggatggatcttgtccacaacaataactgaaattgtaagcctttgtgaaaacagcccaagtggttcatgagagaaatgaatgttcatcaataatgtaaacactggacataaaagttaaatcaacaaagaatattcaccacccagctcactaaatccagcaaacttgggcacacaaggggcccactggagtcaatgatgttgtaatcaacagtgagcatttcggagacttataagctacatatttgtggttctcatttctcactgtgaacctttaaaaattgtttcaagtcatcggaggatggctaatgttaacagcaatacatattgaccatttgtataacattggtgtacagtgttacaaagtgctttgcatatacattatgttaacagatcctcttcaatctgcaactcctttttttttttttttaaaaaaaaagataactctttctctgtcgccctggctggcatgcagtggcacgatctcagctcactgcaacctctgcctcctgggttcaagtgattctcctgcctcagcctcccaagtagttaggattacaggcatgcaccaccacgcctagctaatttttatatttttagtagagacggggtttcaccatgttgatcaggctggcctcaaactcctgacctcaggtgatctgcctgcctcggcctcctgaagttctgagattacagacgtgagccaccgtgcccagccatgcaacttctctttaatggccagaaagtgcatttctcgaatgatgaaactaaaacccggagggtcctcatctgtgcaggcaggtgagcatacctagacacccggccctcaagcagtcacttactccactctccattttcaacccagcttcattcggaacaaggaggggacaaaagggtgggaggagaggctgctctgtggaatgaccgtacaagttactgagagatgaaacaaaagcattcattttctattaaatgtgaaagatctctcaatctctaattggtcctgcactctaaggcaacttagcagggactcaagtacaatttccatggagagaagtggtcaaatagctgaggtcaaaccctccagactccaactgcagccaagtgcttttatttcccttgtaattttctttaagaataaatgttaaacctaaaacatacccccttttggaggcgatcttggcagctggactgagtgggaagaaaaagcaccttgtactccccgaatcagcagccaaactatgcaccattgtctagaggcggtcacatgacagccatcacctgaaacttggttacttccaatccatgaaggaaacaatcactagtgtgccttaacccttccagctactgcaggcagccatgctgcagctgctctcagcagccctctctcccattccagtccccgcttaggagaaactgtgcatggcacaaatctgattgggacaaggtggcgtttggggagaagggagggacgagaaggaaaatcactgctgtcccttctaagcaaagactactctacctctcccagcacttgctgtctcgcagtttaaattaattacagctgaaaatacagggttgccatctggtttgaaaaagcaaggataagggaataaaatgaaagggttcttggtactaacctcactttaatcattgccaaagagcatgaagacagcccagcgtcctcccacaagaaagccttgggcctcacaaacttggcaagcagtctcaggcacaaaactggatgggcgggcgcttgtcagaataaaagtcctccctgaaaggagggttgcgaggtaaggggcctgcttgccccctgcactgcaataaaagtttcctatgggtcctggggtaggtcaggaactcctgggagggtttatttatagagggtgccttgccaaaacgctacacgcatcattacagttccatttggtgagaaaatagatttgctgtcagaattacagcacgcgatttcctctttctttgtttctccatcttccataacataaggcttttataaaacttcaaaataaggctaaagaaaacacaggagaggaaggttgctgcagaagtggagacgctccgaaggcacgatgcatgcaactccacagcagggctgcagccggcccctcagagaaggaatgccagaaatcccctattctctgctgcagccgcaactacagtctcactcctgcactgtaggaagcaacttccttctgcctcccttccaccagcagaaccctaggtgagaggcttttctcttaggactcaggctgccacagatggtgactccaggcactggagaagcaaaggtgccacagccatcctaggtttgtcttggtgaacttacaggtgggtgcaagaagttgctaagtctgcagatgtcttagccatacgccagcatcaagtagcccggagaagtgaagcagaagattttcagcccaatttaaatttccacctgcccactacctgagttcttttacacccaggtcagttttgcaaacaagaccctgatatacccaagcccagctgctttcagaaagtaacaccaattgaagcaccacggtatttatcagagtaaactctgatcaaccagatatagtattttataaaccagaggttctaattataaaagacaagataaaagcagattatgaaaatagcatttctgttctggtgaaaaacacatcttcaaccccaaaatgatgtgaaaattgtcttccaaatcctgccctgacagaatcactgtctatagcaacagtgtccataacattccaaatctcaggagtgtaactttctagtaaatggtacatctgtcaagccacaggaaacatctggtaaaatggttaaataaaagcagaatttaaacttttctgatttcagagcttactaatggtactcaacaagagactatcaaatactctaaaagctcaatgtgacagtgaaaaatatcctggaggggaccaggtgagaaaaagaggacaaaaaaagaagacaacccgggaaggagtgggctgcaatcccactctcgtcacgatgacgatgctcccattccaggcctgcctctgggagacagtggccatagccccctcagctccgccaaggatgggcacattcctgcccatcaccatggcagaaaccttctctggcctagttaagttcctctctacccagggctgactcccccaagcatactcatatctccccaacgcacccaacccaggaggccctcaggagaggtttggggggatggactgacgaagtgatgacacacaaacaataagcttccctccgctccacggcagacatgtgtattaaacacatacaatcattctaccatcaagacacacccaggccaggtgttacacaatacatttcagtcccttccagaacattttacgaggcttttccattaaataaaagatttaatgatttggccacatccaaattttaaaaatctatatttcaaaaatacagtaaataatgctgaaaagcaaataacattacttattttccccaacgcatttgacagagcatccttaatatgaagagtcgtaacatatcaagagaaagaagatgaatactctaatttacaaaaaagacaaggtataaacaacatcatggtcacagaagaagaaatgcaaacggccaataaggatatgaaaacatcattcaagttctctagtagcagaaaacaaacaaacaaacaaaaaaacacacaataacaatgtttctccccgagaaacttgcaaatattatataaatgaataaatggtagcagtcacctgtgggaagatgccgagagagagacagatgcatacagctgctggtgggaacagatcagtaaaccatatagagtgaagctggcagaacacaccagcgaaaacagacatggaagacctctgacccagaaattccacttctataaaagtgggaatatatgagatgggaggaaggatggagatattcgaagttctgcaaatgacagtaaaacaatgtaaacaacccaaatatctgtatttgttaaaaagttcttttggttacaagcaacataaaacaaacctagtttaaggaaaaaggggcaacttactggaaagatactgtgatatttcttggaaatgaaaaaatgctgaccaaccaatccttgaaaagagaaaaaaaaaaaaaatgaggtggccccagggatctgggcttcaggaggcggaaggcgcccatggtgggtccatgtgcagcatctcaccagagcctgccttctgccctctcccagcacccagggatccaccaccaccaccaccaccaccaccggctccaagtgtcacaacttggtgaccttcctaggtcctatgtacatatcatcctccaatcactgctccattaaggagttattaacatcaagtcaaaatcccaagaacactttttattatacatcaaatatgctgctaaaaactagaacatgccccaacacacacttaaatgctaccagttttcacagtcaagagacttcactgggctggacacagtggctcatgcctgttatcctagcactttgggaggccgaggcgggcagatcacttgaggtcaggagttcgacaccaccctggccaacatggtgaaacccagtctctattaaaaatacaaaaattagcctcatgtggtggcgcatgcctgtagtcccagctacttaggaggctgaggcagaactgcttgaacctaggaggcagaggttgcagtgcaccgagattgcgccactgcactccagcctgggtggcagattgagattccatcttaaaaaaaaaaaaaagagagagagagagggagagagacttcaatggagccttgaatgaattatttataagtaaaaaattgagggatctcccaagagagaaatctattatggtcttgtttcagatttgtaggtttaaggagaaaaagggacaggggaatgttccacctctgccatgaataagatactggattttttaaaaaagtaaaactgctggaattgttggctagacagagatgagcctttggggcaggaaatcaaatattatgaaaaggtgatttatcttagagcaggcatgaggtgtttaatttattccatgtatctcgccatcttgcattccaaatcttctgcctcctccaacagctctcttgcttcccttgtcctctttctgaatgcacacttcccaccacagaggaaccacacatatcctaaatccctcctttatcatatacaacgtcacccctcccagtgctgatggacaggcgaccccctgccgttggtccctgggtgtttcaaagagaggccctgaggagctgacactccagagcagtctctgggtcccctcttcccatgaaagcccccaacccttccccctgcaaagtgggacaactcctagattaaagattgctagaaaatacaatgactaagtgtagtgtgattcattactgaatcttgaattaaaaagaatgtaaaagaattttttaaaaaatcttaaagtataaagggcattactgaatatgaaaagatgatgtgagatcatatcattgtctgcacacatatgaaagaaagataaagcaaatacgggcaaatgttaacaaccgatgaatgcagggaagggtatgtgagtgttcactgtgctagtccttcagcatttctgtaggtctgaactttctccaaaataaaaagtatctatggtgaggaaacggtgcaggaaggatagaaagaggagattatcaccaaatttggctggaatatgtagaatgatgtgatttaaagcacaggtaatatggtatacactgccctccatatcctcaagttctgcatccacagattcaaccgatcatggatggaaaatggagtcaggcctctgatggtacagacttttttcttgcttaggaataataattccctaaacaatacagtataacaaccatttccacagcatttacattgtattaggtataagtaagctagaggtgacttaagtatacgagaggatttccataggttatctgcaaatattatgccattttacacgagggacttgagcatccttagatttctgtatcctcgagggtcttggaaccaatctcccaaggatatccagggacggctgtatatgacaatcgctttgtcgggagccctcaaataatcttccccaagagttggcacagggataccaggaggagcctgcgtgatggagagaggcctgacatgcatgaaaagatgccactggcaacaaatatgttagtttcaaatattagcctcaaaatgaaagtcacaagggaagttggagaatccaaactgcttgccctgaattgcacgagacctgcttctcacacagacaacaaactctgtgtagcttgccgaaagtcgagaaataatagcagggatttaaataaattattttgaaattaaaccatggctagtggccaaagagactttcaaggcaaggccaaggaggccatcttctgagtaataatactgggagagggagtttgggagcagatcacaaagtccttgatggtcatcctaaaggaactgtgtcttatttcacagtccaaagggggccagagccacaatccagtgataaactcagcaaagtcctccaatgaggttctagaggaatccctgccgatgaaggagctgcatggctcaggcgcctttcagcaatgcctcccctaccaagcgtagccatggtagacagtcagcttctaggtgacatggagtgtctgtgtttctatcactggacgtaacttgctcaaaagccaacggcctaagacaaaatgatgtggtgtcattcaaaaccaacacacagaggatgacagctattagtgatacaagcacaaatctgtcacacaaaaataaaataaacgcaacaacaatctactagaaaacagccgaaaaacactttggctttgaggactttttggaaaaatttgaaaaataccagaactggtacatacttgggccgagatgtgtttgcttttctagcagagtatgagcaaatctgcactttgggtcaatttccacccaaaagaaatgtctggtcatctctctgccctgtgagactcaacccaaatgcactgaattcctcactttcatatacctcactttatgttcacacttggactggagccagatgcataagcaagaaatacagaggagtgaaaaaaatcatttcatccacacaagaaacctggggggcttcttactgagagtcaacaccgggatgagatcacgtgccgtgaaagaagcatcacgggcagggctggtgctaccgactgaacctcgcgcatgtgtgcgttttcgttttctgttttcaagagcttagcagggaaaggagagcggtggcgctctgttctggcacatgtggaagtaaacatcaaggctctaagggagaaaatggaagtatactaagtggtgccactcagggtttatgtgggcttaaaagtgattcttaacatctgtcccaaagggaagagtgtttccacagagctctcctcgtggctcctttttcattcacacatttactcagcacctggttggtgtcaggcactgggagggtatagtgctacagacctgagcaaattcagcccctggtctggtggaacttgtagaccagggaaggggacagacagctggacacccaactgtagcagagtgtcatcgttttacacaaagtagtattcaccttgaagcaggaggaagtgccacttgccagaggaggtggctttcagaaccacactggaggatgaagtgagtgtgcaggcccccagttgggctgcagcccagggggtcctacaggcagacgcccatggagatgggccttggcagtgtcaccctgtggtggactgggagccgtggaaggattccaagcagagatgaatacttcagaaaccaccttctgacactcgagcaccagtaagaccagccaggagggcactgccgtgcaaacagggggctaaactacagccccagccagggcctactgggaagttagcaggctgatccacaggcaatgacaggaggaaggaggaggcaacgtcccagacaaatggaaagagagttgtatcagtcatgaatagggggacagaaggcaaggagtagacttggtgaagtgctggaagaacaatggagcagctgatggcaattccagtgaggcggtgctgaatttagggcacacatacaacacccagtgagagggtggatctatggggtgtgaaggcttggtctaggctagaggtaaagatgtgggactcaacctattgtggcaagtccagccacgggttcatgtgtgacttggttataagggtctgtgcaggcagaatgccagagccctggagaataccaataacaacgagtctctggaagatcctgaggagtggccacagaggtgggaggggaccacagaaagccagaaaagggccacaggaagcaggggaggagagcccttcagggaagaggaaatcaaataagacaagggactgcactctttcctgaacctggcaaccagtaggtcactcctgaatgcagggagaggattcaacagaattgttggtatggataacagcactggactagggagtggatataaaagaacaggtgatctctctagaaatagctatggaggcggggagaggtagggatggaagataagcaggcacagggtcaaaggaggacagaacctcaagtttcctcaatttctctggcctcagtgaatttctctgaaagccccaagcattaaagatggcacccagcagccccaagtcacggaattaaacaccatttcatgttcatacttaaactttacagcaccagagccttgcaagtctgaaggtttgtgataagagaattttggaaccaaataaaatgctccttttgttaggcaatatttatggggcaagtatgctccaaggaatattaaaaataggtcttatgaaaaggggatgaaggattctgtcttagcttgagctgccataacaaaatactgtggacttcgtgacttaaacagacgtttgttttctcacagtcctgaaggctggcagtctgagattcggacgccagcatggttggtgactggtgagggcgcttttcccggcctagagacagccgccttcttgctgtgtccttatgtggtggggagaaagcaagcaagatcgctgtttcttcttataagggcactaatcctaacagaccagagcctgccctcatgacctcatgaaaccctcatcacctcccaaaggcttcatctctaaagagcatcacatcgggggttgaggcttccacacgagaattttgaggggacaccactcagtccataacagattcaatggccaattccatttgagaaactcggctaaacagtgtttctgcgcataagacttctcaaagcctgaaaggtgctaacatgcaggagcagacctgggagactgagtttgggaccaccgaactttgaccagggaacacttccgtttcccttagagcatcttgagagaagagtgttttgagacagtctgagcagtggcgaggggtgtcactccagttgtcagatgcagctgaggaaatgactcctaacaagctagaaaactcataaccatccctagttgggttcaatgacatggaaatttagggatgcagcaagatttcagttctcagatgtgcttctacattgacctgacgtaataggagttggtttgtcctttctacttggccttgacccagtttctggagcttgtttctatgtagattcattagctgcattattcttaggtctcttcaagaagaaaggcaagaggtagtataagaagttggaggagagggcagtagcaacagttgcttccttctattctgcagtatgtgttgcctctgctggggctggaaggctcggatccagaactcagatcccttgtctggcacagtttctagctactgccagacccagaacattactgcaacattaagccctctaattatgttttggagacaatctgtgaagaaatttcaaaatgaagagtgtgtgtgtgtgtgtgtgtgtgtgtgtgtgtgtgtgtgtgtgtgtgttttaacccatagaaacagcaaaatggagagagagcaagacctgccatttaactaaaaactacaccagatacagaatgtggagcttgtaaaccaccttgctatgttccagctgccatgtgacacaagcaaataattgctttatcagcaagaaattagaggaaaataaaagaaccatcaatagccacacctagccaaatttgttagcatttctcttcccagtcttcaatcaaatctattaatgtagatttgggacagcacttcatatacattcaggacaaactggttttgtgtcacagtaagaggtctatgaaggtcacaggcaatgtcgaggttaatcctctagctacggataaaaagagctgctacatatgtgcccagagcagaagcatcttcgcgaagacagcattccaaaaagcacactcagaggatcaggaaaacagcagaatcctgggttgttttgtttccttacattttgaatacacttgcatcatgttaaaaggtgactctgcacagaccaatgcacattctgtcacataccccaaacgtcctctaataggcgttcctctttgagaaaaaagtcctttcaaggttttcgtcccacttttataaacttcatggcacagatcagaaccacagaggctaaagcctaagtccccagtgcagcctggaacagcctttgttctgcttctctgactcctgtccccccttggcatttcttcattctgtgtcgtcgtttggccagaaaaaatgccagcagcaagatggggaactgccttcccagctctctgcgaagactcttaaggcagaagcgaggcctgctgggagaaggctgatgtcagctcttaagagcacagctccctgctcggataaggaggcctttgttttcagctcaactgtgaaaatgagaaaatgcctctagcctgacaaacaagaaacccacacaacacaggtcaggcctgtgacctttacttaaaggtaccacactccattagcaaaacacttccagggaatctgcagatccaagagtggccctcagagaagagcagctctgcttccacctcaggaaggcaggttacaaccctgaagcaaacctcacagagaatcagttcctcggtgacgatcctccctaatgggaatggaaacacacacaactgacatacatggggcaaagtggggggatgctaaagaaactaaaaatcccgatgtaacaacaatattgcagtttccacattagtaatttaggacaactacatttatgaccataaaatatcctcttaaatccccagaatgcctttgggaatacttgtaagatacagtatgaaagtaaagaatatagaatttcagcactgaccctaccaagtttagactatgccaaggaggcgtggcagaaagaaagagcagatagtttgaaggattccattccataggctttgatttatgaaatctagagggaaaaaaaacacatgtcttcaaatacttaaagtaaattataaaatgctccagtttgaatcttttaggctaaggttactattggcttgggccactaacttaaaattgggccacagattttaaacaagaattaaaacaatctaaaaagcagcttcccaagcgtaaagaaaacccttgtttgttcctgtgggattctcacctgtacaaagactcatttcaggcctcttgggggcagctggacagcactcccccttccacaatccctgagggaaccctggtgaggctgtggggacctggagtgtgccgaactactaacgtcccggggcctccacccctttacttccctccatcctcctttgtgtgtgctaaaatgaacagtccccacctcccaaatatcctcagtagtgtgtggtttgagagtgcttaggctgcatcgtcccaaactatcaggcattagggtccagtatcgaatgattcatcgcagttggatatgtgtgctattagcataaatatcccatggtggctgacagcactggctctaggatcacacagcctgagttttgaatcctggctctggtacttaccagagtgtgtgaccctgaacaagttacagaactctcagtgttaccatctgtaaaggagggataacgatagtctccacctcatagaactgtgaggataaaacgatcgtgcccatgaagcacgcagcacagtgccagcgcacaagggctcacgagttgctgttactaacaagccctggaaaaaagccctcccaattctctggatgctgagaatcaggacctatcatcattctccatgatgaaaagttcacctctctctaaagcttgtgtagacatgaacacaataacttgttttgcctataaatacacattactgtttacgacgtcccagctgctagcagggtcaagggactaaaataacctcagcttttccatttcctctgggttcacttttaacctgaaatgaggaattgcttccttcactctcatggaatttgtgaaatagtctcttggtaactggtccatatacatccaaactaaaggctctaaagacatagaagcaacagctgccaaagagggtatgatcatgttgccaaagattttacatccagataccaaaaactacagatactgcagaacatttgaggtctcatatatataatcaactcttctgcaaaagataaagaaaatccagggaaaacccccaatcccattttagccaatcatcaatttcttcttcttactgagttcctattatatgcccagcacctgatttcaaaggcttcctccaaccttttgttaagctgaatgaattcgtggttttgagtttgtttttccctctttttctattcacccctatggtgagaaaagtgaagtgacagggccaggaaaaaacaaaacaaaacaaaacaccagatgaacaatgaaggatgaaaggacaatgcaagcaaaggaagagggagggaagaggaggaagaggagctgcaacaggaaccggagagcccaagcctggaatacacactcaagggcacaccagaatcgggacatcgggctccagcaaacacttcaaaggaagcgtcatagaagcaaagacaacaaggggcccatctcacaccaggaccgtgtttcaaaggccccccatcagcgaggggaggctgcgttttctttcactgggcccttcctcgttcattatgggttgctcagtgggtctgtggcaaacacagctggatggagcacaaggctagtgaccatggctttgatcccagtgtgagcctaggggctctgccctattctgtggccgggggcaaatacactgtaaatatatactgctgatcaaagagaggatgcctgctccaacgggaacgtgggctcaaacagcacttcccctagagacagggtccaattcaagtcaacataaaattatttagcacctaacacatgccagacattggactggtcaagtgtcatcttaaatacatgatgtgcacctctaaagctgcatgtaattccccaggtgggatgtagctatggcatcatcaaatgatcactggtgttggtgtcacacacagcagggttaatcccagctgccaacaacttagacacatcatcctctcacaaactcaatttttgcttttataaaatcaatctgatatagacaaaaagacagagatagacagatagatgtagaaatgtgcctacctagtgtaaagggtcacaattattgtgagagttaaatgagataatatatttcaagtgtccaacacacggccagtctgaagtaagcactcaataaatgttcccttcctcacaggtgacacatcccactctaagtctacacacacacaggtgacaacctcttcatttcagcacagagccctctcaaggttctacccacgaagcagcctagaatgactctcacaaccgatatgaatttaccatactgttacactgcacccactgtttgccttcaagagttttaattctattacaaatacacaagatattaaaatgcacgaggtcatccattgcagcactgttagtattgtaaagcacctgaaattgccaaaatgtccaaacacaggggactggttggatgagctttgatgcatgcaggtaatagagtgccacgcagctgaaatccagagtgaggagctggtaggaaaagatttccatgatgtgtcattgaaaaacacgaaggcggccaggcacggtggctcacgccagtaatcccagcactttgggaggccgaggcgggcggatcacctgagatcgggagttcaagaccagcctgaccaacatggagaaaccccatctctactaaaaatacaaaattagccgggcatggtggcgcatgcctataatcctagctactcgggaggctgaggcaggagaatcgctggaacccaggaggtggaggttgtggtgagccgagattgcctcattgcactccagcctgggcaacaagagtgaaactccatctcaaacaaacaaacaaacaaacaaaataagaaaacaccaaggctgaagtgagtacacacagtaggctatcgcacatgtaagaaagaaggggaaatgcagagaaatgcaaatcaaaaccacaatgagataccatctcacaccagttagaatggcaatcattaaaaagtcaggaaacaacaggtgctggagaggatgtggagaaataggaacacttttacactgttggtgggactgtaaactagttcaaccactgtggaagtcagtgtggtgattcctcagggatctagaactagaaataccatttgacccagccatcccattactgggtatatacccaaaggactataaatcatgctgctataaagacacatgcacacgtatgtttattgcagcactattcacaatagcaaagacttggaaccaacccaaatgtccaacaatgatagactggattaagaaaatgtggcacatatacatcatggaatactatgcagccataaaaaatgatgagtttatgtcctttgtagggacatggatgaaattggaaatcatcattcccagtaaactatcacaaggacaaaaaaccaaacaccgcatgttctcactcataggtgggaattgaacaatgagaacacatggacacaggaaggggaacatcacactctggggactgttgtggtgtggggggggcggggaatagcattaggagatatacctaatgctaaatgacaagttaatgggtgcagcacaccatcatggcacatgtatacacatgtaactaacctgcacattgtgcacatgtaccctaaaacttaaagtataataataataaaataagataaaataaaaaaaaagaaagaaggggaaatgataaaacattcacatatttgcttgatttaccaaaacagaaacacaagaaggatgctttgcttccagggaagggagtaaaaggtgtgaacaagacagggtagggagtaacattaaaagcacactttttagtacagttttaactttggggagcatgttcatatcttacatactcaaaaaataaaatttgaaaggatggaaaaagtctaaaactgaatgcaaacagaaatgaatgaacctaacaatatatttcaaataatacaacaatactgaggagaaaagggaaagtaactcttcaaattcatcctgtgactattataccctcagcatgggagaaggaaaaaccataaacaaatcctgaactctttttagtttgtttttcaaagtggtattggcaccatgcttctgaaactacctgaagtgcactgcaggagtggaccatgagtacatgtgtggatgtagttcttactggtgaaccagggagatagagtatggaacggggagggcgaggaggagctcgggagagttgggttagccctggagcatcgccaggaactcattatctcctagctctttccatggaaaggatctagaaacagcactgttcaatagaacttcttgtgatgatagaaatgttctgtatctgtgctgtccgatatggtagcgaacggccacatgtggctactaagcttgaaatgtgactcctgcagctgaggaactagatttttaattttaatttaaaatcaacacctgtggctggtgtctgctgtactattagacaaatcaagtctagaagcaatgtgatcatagtaacaataagttaccatgaaaaactatgtaatccatagtaacgataacacctagcacctggatctgggcttctaaatcctattccccactaaaaggatctggagtcccctggaaaaacggctaattccatggctggagcaggtaggctacaagatgagcctagaacaacttgtaggccagaaaataagaaagtgctcaacaaccacaaggaaataatggaggttatgacaaggacataggaccagtggacagggttcttgtttgtcaactctgggacagctacaattcattcagtaagacaggaaccccggagtccatatggataataagtagataaataggcaggcaggcaggagaaaggggaagagctctttcttaccagattgcacttgaatatcaagggccattaaaaaaaaaacttactgatttttccacaagatgaatcccactccacctcttcccatcctttaatccactctttccaaacacagagtacttttcaacttccaaacagacattcatcttcttaagacttttcttaagaaataaacagaaataatgtatttctcagggtcaccgtattggaaccaacccaacagtgtcatggataggttaatggataaatgcagaaattgacctttctagtcttaaaacttaaaacttacatttgttttatctgaggtctttaagaaaagaccttcagtcctctcaaaaacaaaaaacaagtgtcaaagaactgaagcccaccaggtaactacatccagacaaagagatgtgggaccgtccttcatcatgattgtgtccttgctcctcccaagttcctatttgttaaatcttgtttcatttcttccctgctatataaaccccagctttagtccatcagggagatggatttgccccatctcctggactgtagcacccaatgaaagccttcttccttggcaatactcctcatcccagtcattggctttctgtgtggtgagcagcaggacccagaccaaacccctggtggttcggtaacaatatcaacaaaaaaattaataatgagttcaaatacaccaggtcctaagaggctggaataaaatcccaggaattctaattttcaaaattctgaagaaatcactaaggaaacctctctttttttccccttcccctaaatcaaactggatagaactcagtcttactctctgttgccttttttttttataagacatcatctcgctctgttgcccaggctagtgcaacggcatgatctcggctcactgcaacctctgccacctggattcaggcaattctcctgtcacagcctcctgagtagctgggactacaggcgcacaccaccacacccagctaattttttttgtatttttagtacagacagggtttcaccatattgatcagtctggtctcaaactcctgacctcatgtgatccgcccaccctggcctcccaaagtgctaggattacaggcacgagccacctcgcccggcctctgctgcttcttactctggctcagagccacctgatctctccatctttctactagaaaatgtctccatatgatgcttataataaaatgcagccaaaccgtgcacctttcaggccttgttagctagctaccgaaactattttttctttcttcctctctctctctcccttccttccttttttagaggcagggtctcccttttgtaccctggctggagtgcagtggtgtgatcacacctcactgcagtcttaaactcctgggctaaagctatcctcccacctcagcctcccaagtagctgggagcaaaggaacactccaccaggccaagctaatttttaaaattttttgtagagatgggggtcttgctatattgcccaggctggtctcaaactcctaggctcaagcaatctgcctgcctcagcctcctaaagtgctggaattacaggcatgagctagcacacccagccaaaactcttttccaataacactcctttccccagaattattatgactgctttagtgataaaatacatcacattttcattacatgttattaacaaactctaagaagataaagcacaaaaaccattttgtaatctccttaaagagatacactaggctattccttttcaaataattatgaatctgtcatttattgcagataacttcttaggcattaaatataaaggagggagcatgctatagcccaaataggaaacatttcatcaaacagcagcactaaataccctacaacacgaagaagtaagacaggcagcatctttccaatctgcctgtgaaatctgtcattaggctcttagaaaacacagtacaaacaatggtaatgttactaaaataactatcacacagtaaacaagtaacactcagaaggacctaaccacacgccaatcgcctttcctccttacactgtacacttaagaaaatacattttataatatatatattttttaccacaataaaagaaaaatgaggggggagtcacctggctggtgtaagggagtctgagagaggaggttactcctgtttctattttcctaaaactttgcataataatgtcaattgtgatttgcacataaaatttggcgattctattatttacacttaaaattatttatagtgtcatcacagacccgtacctcaaagtcttatttttagccaccaagagagctacaaaattattttcttttttttttttgagacagagtctcgctctgtcacccaggctgagtgcagtggcgcgatctcggctcactgcaagctctgcctccaaggttcaagtgattctcatgcctcagcctcccgagtagctgggatgacaggcatgcaccaccacacccagctagttttttgtaattttagtagagacagggttttgccatgttgcctaggctggtctcgaactcctggcctcaggtgatccacccaccttggcctcccaaagtgccaggattacaggtgtgtgagccactgcgcctagccacaaaattattttctgaacattttaatattctaataataatattaacaatgactaaagctgagtacttactatctgccaggcaccattcttaagtccttacaataatcctatgaggaaggaattaatattatctgtgatgaaagataaagaaagtgggaattgaacccaggcattttgattaaaaggcacatactatcaaacattaaatccaccatatatacatatgtatattttcttactctctatcatcataaccagtatctgaacaatggaataaaaataacaacccccatcaacaaagtgctataccatgccaagctctttgcatattttaactctagtcctcgtaatagctctatacattaactattatcattgtcattgtcattgtccaatgacaaggatatcactgtcaaggatactgggcccagctaaattaagtgacttgtccaaagcctcacagctgttgtgtggcagaatcaggatttaaattaaggcatgtttgtctgcaggctgccttcccctttcttacttatgaaaagaaaaagaaaaaaaaaaaaagaccaaatgttcttatttgggtttgggaaaagcagatgggaaagtataagaaattcgtgggaataaaagaatgaactgcaagagctgagcacccaggagttaagctagccctgcctgcggagtgcactgtttgcagggccttcctgctggattcctgatggtagcaaattccagggctccagactgcaggctcagcctctgactaacactgcagtgatttatttgaggataaatacctctgtcagtgtcttatgactgaacacaacagtccaagctgactggaacgagcggaatgcgaggacgctggagctgaggcagtagaggcgggagctgggccacctctctgcggaaactctgcctccaaggaggagccctcacaggaaggtattcctgtggggaaaaagcagtgccctcaggaattggagcatcttgaataatgaggaaacactgactcatgctagagtgagcgcttgggaagggggaaggaggaggacctctgtacctgcacacacaaagctactccctccaatactcagtgcaaccttgccaggattggcaagataactccaagaacaccaaccgccctcaccactgtacccgtagactctctgggcagctggtggggcgtctccaagtcctgaaaactggggagaagcctctccctctgcgaggagggtgtgtgccgagaggagagtgcaaaggggagaagccgggtgcacggaagcgggaggcttttccagtggaaacatggtgacgttgcacagattcagggatctgtggtttcagcccgtgtttcacaaataacaaaactgaggcccaaagagttgaagcaattcatgtcaagaaggtagacagtgtcagtggcagatcaaggactggctggatgtggtgagtggcaccttgtcatgagcataggaagctggcttccctttatgggaaggtcccaagtttgtaccaggggcacataaggtgggatgaacacttcttcgtgtgtacaatcctagactcctgagtaagaactttacagacgtctgcttggtcaaaaaggtgctgagcttcccttctatttgtctggtgcacagtgacattcactaaatgttgattctcctaaaaacaatcaatatgtatgggcaaaaaaaagcgaagcttagcagatgactactcgactgctcgcagaagctctaaggggacattaacttctatggagtttaacatgcggaaggtcctacaagtaggctggagggaagccagacttccacctcaccgcgagttatcaaaatgagtttactaccttctttttggcagatgaatactatttttcttttgtaaataatatccttttcaaataaagtatgcaaatgataacatcagaattagcacaaagttgcaaaacaaataaggccccagcacggagcacccttaagccaaaataagaacagaggaactcacagatgggggttgaagatgcgactcattttggagacgtggtcgttgtcacagtctaggtcctcgtcacctggctccatgctgaacttcctcttgctggggctgattgggggagggccggtgcggtgactgctgagggcagaggccaccggcagggtctgtattctgggttctcccctgagagcagcttcgcctacgcagagagagatgatgtagtcactaagcaggagaaaggcccccatctcagtcccccaggctccccgcccgcccagccagccccttacaaaactactcccagtggaaagtttttggcaatgggacggggccgcctgccatcctctgaacatggtttgagtgtggttagctgccaaccatgagacattttacatcaacgtggttttctagcacagtcactctttagggtagagtttaaaataaaaagttgcaataaaatagcaggggggaggcaaaaagcattttctgtaaacaatttcaaaagttaatttaaaacaccaaaggtcttttcacgtgtgggtattccactcgatacagataggagaatgacctcactgcattcatgaaaccactatgcccaactcacttttcctgcttgttctgttttttttttctaatatagtcttggtatttaatttcttttaaaagaatgaggaaagtgtgtgggctaacagttcacacatttgtaccgaaagttaaaagaaatataaatacatcgtttaatgggaaataaatgtttaattcttacagtacgctaaatattgcacattaaaatattatcagcacaaagcttcggcatataacttatcgcaagcataatacgtgggtaggtgcagttctgaaacatgtttcgaagttaggcaatcaaattagggtccacatttccatttgatttgacatcttggcgtttttcattattattttaaaaggttttgtactaggcaatcactttgtgcctcgctgtgaattaaaataagcatagcctttcatagtaataaagcttgtgtaccttctaaactttataaagacgaatgattactttaagagaaaacttcaaactttctaagtcacatggggggagcacctaaatttttcacaaataataacccttttgttgtgctgtacattttggtctctcggacctgaccaattttctttccatttggtcacaatttgagagtaatacgaggataaagtcaacttcatccgaggccttgtggtacctaagaaaaggaatctttgtttgccaccactaattttcatatcatcacagatgtgtggacagtgttaacagtcatttacttcatacacatatgacaaatatgattttgttggagaaaggagtgaggaaaaaccctctgaatatttaccaggaaaaataaaaacttggccaatttactcagcaagatataaactagcaaatatacagtgacccataatacacctccagccaggatttcttttaaggattctggccccaaagcaaactggaactttccattttaaatgagatacctaaaacacaggcctcacgctggcctgccacactcagaaattcagtatgatcttggttggcctatactccctatttagtaattttcattttaaaaaacaaaaaaagcagtgctcatctttataccttcataaattagaaaaatatcctttctaattatctccgttatttgtgatacttcctcctccacaaagagagaagagggtgtttccaagggaaagcttcagaagcccaagcccagctaactttctgggaagccctgatgatacccccaggaacgcagcaactgcaaatcaaacctcatcaaaatggcaccagctgaccctcctctccacccagggtttctcaacacccctggcaggatgcgaggggatgaggagtcctcgggcttggacccccgaactgtggtcatcatttcatcagatgccagctgtgtagcaacaagagttgctatggaaaacaaccactacagcaacagactgaaatcactccaaaaaaggagccgtcactcattccaccagcatacactgtgacgcggaaagcaaaacccttgggttaagaacaacattcccactcccctccccagtttccatcctagtaaaaattctcgtgcttgtttgcatttttaagttcatccaacggatgcagtgcttatctttaagactgaatcactgatgtctaacatcgaaaaaaattccacaagaatcctcagaaaacactggagatttctaacccacgggtgggggtgggaccagggctggggctacaggccccatgaaggcactccaggtgtccttcaccagggactgtgacagacgcctccaccaggtcccggggagacggtggtaaatgcgtgctgtagtacttcagcatctcagcttgccggcgccggaaggagcccaggaagcacggtttgcctcatttgatggatgacgaagctgtgccccaaaacatagcgtgacttacccaagatcctccagttaacaggttagctggaggcaagaacccatggcctctgcaatcagacaacgcctcatcctaagactgtgcagcctcacacaaggcttacagcaaaggaaaagaatccgcacataaggtcagggacaggtccgttcagttatgtgcctttatgcatctttggggcccctccctagatggccttaacccaacacttgtatgttagacaagagtggtaactgttgtatgtgtggtggggttaaaattatttttgtaaaactgaagcagacatttgttctgggagataagacacttgcattgcaatcttgactcctcctttatttaggatggggtgaatttgggcacgtgcttcccctctctgggcctccctccatacaacaaggggctggactagctaatgtgtcatgttctttccagctcttagaattactgatgcaattctatgatcaacaagtgaccaaccaactaaccaacatttacaaagaaattgctacttgtgtaatggtgaactaagacagcaaaactcaaggtatgtacctcagatgttattcatcgaaaaaaacaagggtgaccctggggtcaaataaatttggaaaccgtgagattgaacaacttttacaggagtttaactacaggcctttctgtcttctaatgcatctcagtctctgagatggaaaccccgcagggctgctttccatcgcccgccacgcccccgcccacccccaatcctccacagctctgtgaattccatcttccaaagcgcccccacgcccaccccccacccccaatcctccacagctctgtgaattccatcttccaaagcgccccacgcccccgcccacccccaatcctccacagctctgtgaattccatcttccaaagcgcccccacgcccaccccccacccccaatcctccacagctctgtgaattccatcttccaaagcgcccccacgcccaccccccacccccaatcctccacagctctgtgaattccatcttccaaagcgccattctcagcatgttggcccatcctcaccccagatatccagtgactgcagacttcttctgcattcgaaaccccaactgcctttctcatttttattcctagtattcctctttatgagccctgaaaatttcagcccagtaagttaaactagactcatcaccattccacagagaacttgttcttcccccaatcttctcatttaagttcatacatcctgcaaaaccacttaaaatgcctcctccatcaggctgtcctccttgattcctccagctgaaggtcatctcctcttcctctgaacatctatagaaacttatcactctggtgcttccctccctactttattttgtgctcctggaagcaggtggcatttaattcatttaataaacctgacagtgcagagcacaactgacctactgaatcaatgaggcaaggtgacagggtgggcagtttacagagctttaggatatgttaaagatcaaagatgttatagaataaggagtgtttaaagatctatttaaaaatataagaactcttacaacaattaaaaagataacaaaaaatagaaaaggatctaaataggcatttccgaagagaagatatgaaaatagccaataagcacatggaaagatgttgtattagtctgttctcacgttgctgataaagacatacccgagactgggtaatttataaagagaaagaggcttgatggattcatagttccacatgcctggggaggcctcacaatcacggaggaagccgaaaggcatgtcttacatgatgacagacgagagaatgagaatgagagaaaggggtgttcccttataaaaccatcagatcttgtgagacttactaccacgggtacagtatggggggaaaccgcccccacgattcagttatctcccaccaggtccctcccacaacacgtgggaattatgggagctacaattcaagatgagattgggtggggacactgccaaaccatatcagatgtccaacatcgtcagccatcaaggaaatgcgaatcaataccacaaagagataccactaacacctgttaggatggctatgatcaaaagacaatacaaaagtgttagcaaggatgtggagaagctggaacacgtgtacgctgctggtagaattgtaaagtggcattgagaggtgaggccagctggacttgtaggttgggtgaggacttagagaacttttctgtcttacaagaggattgtaaaatgcaccatcagcaccctgtagctaggattgtaaaatgcacccaatcagtgctctgtggctagctagaagtttgtaaaatgtgccaatcaacactctgtaaaaacacatcaatcagctctctgtgggtagctaaaggtttgtaaaatggaccaatcagcactctgtaaaatggaccaatgagcaggacataggcagggacaaataagggaataaaagctggccactccagccagcagcagcaacccactcaagtccccttccacgctgtggaagctttgttcctttgctcttcacaataaatcttgctgctgctcactctttgtgtccgtgccacctttaagagctgtaacactcaccgcgaaggtccccagcttcattcttgaagtcagcgagaccaagaacccaccagaaggaaccaactccggacacagcatggccatggtggaaaacagtctgacagctcctcaactgatgaaacacagagttaccacataacctagcaattctagtcctgggtacataaccaagagaaatgaaaacaatgtccacacaaaagcttgtacatgcatgttcatagcagcattattaaaatagctaaatagtggaaacaaccaaaatgtccatcaactaacagatgtaaaaaatgaaatatccatgatgtaatattatgcagctataaaaaggagtaagatactgattcatgccatgacacagatgaacctacaaaacagtatgctgagtgaaggaaagcagacacaaaaggccacctactgtctgattccacttctatgaaatgtcagaagagggaggctcacaggcagaaagcaggtgagtcggtgctgggggctgggagaagggggaatgggaggtgacagttcacgggtggcaggtttctttgggggaatgacaaaaaccttctaaaattgattgtgataaaagttgcataactctaaatatgctaaaaaccactgaagtgtattgtagactttaaatgggtgaattgtatagtatgtgaattatgtctcagtagaaatgttacctcttcctcctccaaaataagaatatatttataagcagtataaggctccaatatcattagattcttttttctctcaggcttttcacactaaactattaaacaattaagaacaggcatttgtgaatttccccagaaataaaaacaaaccttttgttattacagttacatctccctagaatattaaagtcagataatttttaaaacattatttattaagctaaaaaaagtcaaatcagtgaaacacttgaggtgacttaggctcttggattcatcagatcctataaagctgcagctcagcttttaatcagtgtgtcgagtgcctgtgacacactgaaggctgtgcaaagtactgtcacaaaaatacatgatgaaatgtatacagaccctgaccacaagggtgggaggcaaaagcacatacaccaaaaggaacttatcttgggagtgcaagaggcttttccctcttgttctaacatgtattcgaaatttcacaatggtctggcaattgaaaaaggagaaaagattatctttctttttcaagaataaacagaaggaagatttgagctgagtaaccccgtattttaagctttacaagttggcttaactacaactgtcagttttacttctttcaaattcccaatgacaactaaagaagttttattttttaaatgtatttggccttttacatgaagataattttatctaggcacacgttagaaaaatgcctagataaaatgaagaaaaatgccgaatatatacaaaattaactcctgtggttttttggcatggtggcaattctaacacatggatcaataatattccttcaaatttccccaaagaagataagcaaagattttggcctaagatttcacaagaatcagcatgtttatttcaatggcagagaagtttaacagagagaaatgaaaagagagaatcacctcgctttatgctgtgctataatatgattttgacaaaatatcacaagaaaattctgctttcaaagtcaaaatagaaagaggggaggagaacagggaggaaccgtggaaaatgtaaccccactgtaatcctgtcattaccatatctcaaagattctaagactatttcctacattttaatattgctaagactgaagtttatcttacaaataattggcatatattaacagccaagattgcttctttttcagtggtacataaaataatgattcacacagaacctaactccagaggcttcaaaacagcactggtctcttcaacctccatttttttttggagacggagtctcactctgtcgcccagactggagtgcagtggcgagatcttggctcactgcaacctctgcctcctgggttcaagtgattctcctgcgtcagcctcccgagtgtagccgggactacaagtgctcgccaccatgcctggctaatttttctcaaattttttagtagagatggggttttaccatgttggccagggtagtctagaactcctgatctcaagttatctacccaccttggcctcccaaagtgctgggattacaggcctgagccaccgagcctggcctaacctctgtttctttactcacaaaattaagtggtttgattagatcatcttgacagcctccttttggctctaatggactacatcttccataagagatacatcttctaaagttaagtttccttttactgctcatcaagaaatactttccaaacttttacagaacacactttacatagtggtagaaaaagcagattcaacaaagcaatcaactaacaaaattttttgagattagctaattattagcatctcatgattaagggagatttcattaaaaaacaaggactcttctagttctcaaagttccagcaacattcatttattcgaatactacaagaaagttgtagccagctgaaacctggacaaatagaatctggttcaccaaatgcagattcgattttcatagaacagaacaatcaaggccatgaccttcaacacagagatggggcgagtgattgggtttcagggggattaatggactctcccagggataaggcggcgttagcaatgggaacccgggtctcggccacatggcccctcaccaactgtgcaggcccatcgccagactggggtgtgggctgcatgggaggcgatggcatggctctgagcaattaaccaaaataatggtatttatgggcattttctggagattagaccaacagcacagggtgaaatgagaatgtctttatggagaaggagagggtaaactacagtcaaatgtatcttgctgtaacttttaaggatagatttttgacaaagatctctatgccgtgccgaacagagagtttaagtccacaacttaaatctccgctgtgtctaaggctttacgttcagcccccctcccagcccctttatcatgtttgaacctaaatcaaagaagcaaaaccatagctcggtcggccaagccagccgcgctgcactgatgtgtctccttcaggctgaccacagcccatggcaaccgactgacatcatgtcctggcgagagggcaccctggtaagaggaccctgctcccagattccacgcccctctcacatctcaccctctcatcactgtgcagggcagaagcccccggcagccagggcttactcactttctttcaaataatacttctttgtctcacggtcgagcagctggggagaagacaccgtgaagtcaatctccttcaaattgttcaacttgtggctagccccattctggctcacttttttctttttttataggacgcccattgcaatgcgagccggcagataaaagccgtgacgtgctgtctgcccaagcgcaaggatcgcctgcaatcccccagcccttgggtggcaacacaaagcacctctcatactataatgctctgggcggccccaggctcagctctaatcgtgcagagcctgacctcgcctcgggggagccggctggactgggaagggctgtgcagggtccacaccctggactgggcttggtttgagcagctctactctttttgtttaagagcaaagatgagattgtgttgagagagtacagcctctatcttggactgctaataatatagataaggataacaacagcacaataaaactggtagaagtgaagcatatgccatcttcactagaatttcaaggaatctaaatcatttcatacacactatactttgtagaagccttcctgtatcttctatgagtgtgttttattttataagcgtattacaacatgatctattgttctgacttttcttaatgcagccctgtgagggaggcggggaagaagagctcccgccttgcagccggggaaactagtgtttcaagaattaagtgaatttctcaaggtcgcaaagctgattaatggaagcactggaagtagaaacctgggatttagactccccaacttccatcatctttctaggtgtgcaagatgcttcactggttgaggaaaataaatgggaggaagacagttgaggagggaggaaggcggagaagagagggggagggggcgggaggaaggggagcttattggctgaaccatgcccacccctggaattaacacgttaaagtcccaaaccccagtactgcagagaacatggctgtatttgaagacagagactttaaagaggtaattaaggtgaaatgaggtcattaatccaatctgactgttgtccctataacaagagattagggcaaagacacattgcagaaaggccaccatgcgaggatatgggagaagagaaggcggccatctgcaagccaaggagagagcctgccggagaaataagcccgctgagtctttgatctcagacttccagcctccaggaccaatgagttaatacatttctgttgtttaaaccacccagtctgcggaattttcttctggcagccccaggaaactaatccagagaggaaagaagagaggacgggactgaaacctggttctgacaccaaagatgaacagctgcaactgtcccatctgtctgacctaacatagtgggactgagatgaaagcaactgaacgtacagatgccgcttccagaccagaaccacctgagcacaggaggaaacaaacacatggactggcaagggaggagaatgggtttcctggctgggcactgggcaagtggacagctgcggcctgcccctctgacttggtgatcatctgccctgcactagccagaggaacctcgacctcccaggaattcttctgcttgcctgtaagagaggaggactaggtttgtgttcacaaaccaggctggggcctcctttggatggggaggcagtgggtctgaggtgggacctgctcccagacatgtcgtactgatgatactggtgcaggagggatggtgtctgctggcgcctctggttttaagtattaatagctataattttacaggggctgaagggaaaaagataaaagaatgccaaagaaattatgtctataattctcaacatctattgtgaatatacactagttttttaatgaactgcagttactctgaataccaaaaagcactaaaaatactttaaattaaaacttgttatcacatccacacattgttattcatttaattaggaagttctatactgcttaaaatcattttattatcttcagggctaatagaagtccctgctgtctcatttaccctgttggatttagtttacaactgaactgtatcttgatagactatgtaacactgcaacctccgtggaattgagtaagtggggtcaaactaatgtcttactatacatatcattttggcttgaagaaaactcaggtatgtaacacaacacaaacagcctgaagatcatcagatctaggtttgaggttgggttttagctttgtaaatcataagattcaaaaagatcaaacacaaaacaaacaaaaaagaatgaacactcatccacttccctggtttcccgatgcagatttagtaacgacacctaccttctattcttggtcctccattccctagactctggctctcaggtagcctcagaggcctctgagtaaactaggaaagtgcagtccccgcttagagtgcgagctccgctgtggctgtgctcgtgcaggctaaggactggcatctgcctattagaacagtggtccaaagggtcacatgcactgacatggccctgacacatcaccggtgaaccccaaggagacaaagccagctcagaacctttaacaccaagtgcacagtcctccttaatggaaaaggctcttaaagcctggcagaaattctgcactatatttacttgcaaatctacttttgtaacattttactgttaatgaggaggaggagagttatgaaagtaaattgttagcagatggtattggaatcaggcactttgctgggggctcaatttcctccctggtagagcttataaatgtttagaaggagtagctggatgagggtaagcaaaaaaaaaaagaggcttgttcaaacctcttcagcagttgagccaagcctccggagggaccctggttgccacgaaacagagggattaagctggtaatggtatgatctcttcaaaatgtaagtgttttggtaaaaatactcaaaaaacttctgtctgcaagccctgtaccatgtgacaggttaagcaccgaaggtcatatgctaccatctgcattttcaagacattctttaattggagggagttccagagggtacgactgccacaggccctgagatggttgagtcctggaatcaggcactgatcactagagggggaaaaaagagacacagtcttgcaagtgcagagagagaacagaaaactaaactttccctcttctgatctcccgtaacactccgagcctctagaatggccctgcccacaggctgcctaatggaagaattcaccacgtgctgctcttctctgtaatacctcgcacgtggtcccgggtactgttctgggaggcacggagcagctcattcatttctgtatccctggccactctaccagtgacagagaaacatagtagaaagtgggctgtggagtcagaaaaatgtatgatcttagcagtctcttcatctctcttgagcctctatccaactaccgtgagggatttctatgcgaatcaatgagaattcatataaaggtcccagcccagaacaggcaatttatttattacactgtttgttggattccatctgttggtgcaattcccatttgaaggataagatggctgaacaaagggaacctctaactgtccttctcgctactcatgacaggcccccgcctcgaatacagtcagccactagccgatggaaggggtcaggagacacagtacccaagagcctgggtgagtgggtgctccgaatctgctccaccaggagccggcgacgtcatctcagagcagctgcctgactttctatgactgtttccacatgtgtgaaaatggtagtgtgaacccacacacaggctcagagcgatacccggcacggtgccgcctcctccccacacacactctggacttacaggctttcttccatgcacgtttctccctccctagaatgtgttcagaagccctctctgccaatgcatactcatctgcactttcaaaacccgacttgagtgcctcttgtcagcctcagccccaagagcaccccttttggtgccatctacctgggctgagctgcctggcagcgtcccttgtgacgtgctgctggctccaactcaaaaactactcatttctcagcaacaccattgtgtgctaccgccaaacaggcgatcttgctctctgcagtaggttccagtccagaccctgaggagtaagatggtggtcccggaaaccagttcaaatttctcactggcatacagagtgctgaaggaaggctgtgtataggccccccgattctgatcgtgaaatctcattatcagttccaagccccccacggagctgcagtgggcaggtagctgggacgagacacattcccaagtcagatatctcagccagccatccaggtttcccacggaaattcattaactcactgtattccttactattgctaaatatgctggtttcagaagccacagagtgaattttccaaggattaaaataggacacgaagttcaaagatgtctcagtcctgacacagtggaagcagcattagggacttgggcacgcacaccattcgagagcctgacaaccctgaagacaagtaaagcgagtaacttaaagtcagcttcagtcaaccttactgctgaaacagctacatgcccaagtaaatcattttaatttttccaacttttaatttcaaaaaattttaaagctacccaaaaagttgaatgagaacaagaacatcccattctctttaccttgattcacctatcataagcatttttgtcagtttgttttagctacatgcatacacgttttcttgctgtgatttttgaaagtattaataagtgggagacatcttatttcacccataaatacttaagaacagggacattctccttcagagccacaataccattatcatacccaacaaagttaaagttgacgtattgtcattatctaatatccagttcacattccaacttcccgaactgacctgtctcttttttggtggcagggagggttgggggaggacttcattaattaagggtcatatgctgctcagtgaagttgtcatgtttctttaatctcctttcatctaaaggaattcttttctctttcgtgacactgatgtttttaaataatgcagaccaatgagctgtccctacaaattttggtggcctaatcatttctttatgattagatctgagttaaatctttttggcaagaatactacccaggtgatactgtgtgctcccaccgcactgcaccacaccggaaggacctggcgccagcccatcccatcactggggaagcagagcctgcagtacacacagattgctccttgctctgttagaaacaagtaagctcctcccttttgtagtaatagtttgggggtgtgaatcctgtcattgtcactcaatcacatactcatttttttgtttgggttctgtttttctattatttttatttcccatactcatttattacacacctttaatttgcagtttgagagtgcagagctaagctggattaaagacagggtccccagatacaattcagcacaagtccaactggggacacattttcatacaaaacacattgaaagaaagacagacaatacaatcaggagtagcttatactctgcctggaataaagcaggtgcttagcaaatatttgttgaataagggacctgtatggttcaggcaaataaaagctattaggccaatctgcatcctttccattcttccttctcacatcacctcacccctggggctgaaaggaagtcttcgaacgtggccaccctgcctcccaccacgagagatcaggatccctgactgattggattgccggagtaaaggctcaactgcctcaacctgatcagcccatctcaccctctctctccagccttacccatctctctttctcttccctcccccgcccctcagactccactgctcctgaggtgtggtctgcacacgcaggggatgcctcccacctcccctcccacctgcctggaacagtccctcactttcaggtctggtctagagtgcaagcctcaccttcttcaagctcttcctcagcaagtaagtgttccttggtcttcagtgtctgaaaacatttacaagcatcctgcgttatggctcttaatcctatcgcctaacggtggtactatttacaaacattttcacatggctaggaagccttcaggccacttcctagacccagctcattccctagggcctcctttcctttcctagagcaggctccagggataagccctgtccttgtcctttgctatgtcctttcataaaagctgccacccatgctctcttattgagacagtcctcatcccaaaacgatagtgaagtgggacttgtgtccctgccacatcaccccaaaaactgacacatggacatggaacctttatttaaaaggctaattgttgaatccagtcctgtctaaagaatgtatacaatttaggactggcagaaaaaaaatcagaggatgtggttcagtgaaaggcattgttgtgcctgggatgtttgtaggactactccaggaactaaggaaaacacacagatgtttgagatctggtctttgcctcgaaaattttagttctagtgggagtgataagttatggagataaagaactgtaaggatggaacattataaatgccaaaataaatcagatgctcttgaaatgggtgaattgcatggtatattagttatatctcaataaagctgttacccccaaagagcttctggttatgtaggttaatctactgacatttatcatagtaggaattaaaatggggaagttttaaaatattaattaatttgaaataaaaaataaaaagagatgcactttttatttttttaaaaaaagagagcgatgccacacacattttatatgagggagacaataattctaactctaacaggagtgggatttgaaaaacaggcaggatttggacacttagaaatgatgggtatgagcattccaggcaggtacaagagtatgaggcaaggcagagagcaggaatgatgccatctttgtgcgagagcaatgggactagaacaacgggtttgtttccttagacttaaggctggatacagagaggtgggtcagataataaagggctctgaacacaggtgaacggctgagacctgacgaggcgggtcactgacagggagccactgtaagcactgacacagctacagggaggcttccgtgaggggtgctccaacacaccatgccagatgggtgcacacacctgagtcagggaacagggcagggacgcaagcgttacgtgaggaagcttcaacaatgttcctatcagtgaggatggagaagaggcaggttgaagacacattttaaggaaagatcagagagctggtattccagctagtattatacattgacctgatctttccgaaacaggccaccctcagcttcttcctaataactctctcaatgttgacccttccttcgtataaattgagaaactatgagatgaacaagccaggaagctacacttgttccctagcttatcaatatgtaacaaggaagagtgagttagtgctagaactccatattttaagttccacaggttgatctaacaaagtctaattaacctctcatatttacatttcaatcactgtcaggtgacgtttttatgtactaataagattccatttttattcttgaagaaaactgtcagtatactcattttctttaaacaatttagatgtccactgtttgatggcaggggttgtgctaagagcttccatttatccatgattaatcaacatttattcaacagacatttcctaaaatctgagttgtgaagaacatcaaacaaatcaaataataatgcatacttatagagggaaaaatctgaataccgatgtttaaaaactgactccaatgaaatctacctatattaaaataaaccaattctaaaaaatcatcatccttcattagattggtgtcaggctaatatacagatatgttgggtttttcacagtatatggtatattctggagtgcttttacagataaattttactcaataattatagtttatgtaagctattattacaagatgtctgtattatccaataaaaaaactaagaggctattagaactgaagtcaaaagtatgtgactagcttgagaaagtattaaaatatttattggagagttactggagagtcaaacagctaatttcatacatgggtaagtaattaaataccaaaatgtatttatttcttaagaaaaatggcttaataatggtgttcagcataaccaaagaataggtaaatctgtaaagctgctttttaaaggtgcaattgcagacttattccacagattttaatgttaatgggaaatcgtaagatccttatgcaaaaattatacacaatcaaggacttttgtttccttaccaagctccaagaaaagagactattaaataataaagtaaaaaagtcatagaatttaacctgaaaacaaatattccattagcatgtaaaatttaatgtgtttcctaaacaaaatcatccccatgatgccaagaagttttctactggagtgtgaaggtgaaggaggtttccccaaattaatcaacctaaaatattgggggatggggatgttgcttacttttcatttctatttctttctatcctcccacctctctctctttttacatttacattacccagtgagcaaattttatcaatgagaagccaggaagggctgactccctttggtatatttacttaagatataaaggccaatcaaccattgtgctcagaaaagttgtggccgtttctgggcctacttcagatctctccttagctccaagtgacttattatgaagccaaagaaagaggaaaactgagctgatcaaaggccaggctgtcattaagtgaaaatgatggaagatgaaaggcttgccctgcacttcaaaggtacagctgagctcgggtgagctgacagcaagcgatcagggatcagagaggcaggcggtagcttaatggactagatgacattcctagagccattcatctttataccaatcacgaaaaatagaaacataacgacaaacatgcatttaaatgctttcctactggatataaagaagagtgggtaacccaaaaatataaagtgacatacatcacatctacacttacagaatataaaataatgaggtccaagaactgttgaagaagttggcatctctaagcagtgcagaattacatgttaacagtttttccttatgccctagggtgtgtaatgcaatgaagcttaattttgagagaccatggatgcagcagtctcacttccctggtgggctaacgcagaacacttggtgtgttgacgcggaagggcggtcaaacttgcttaagattttggggttagagctggtctagagccaccatagggctggggaaggaaggttggaaaaatcaggccgattgatgattacacaatattccccttattccaccccattcacccctgtacagtgccctcccacccatacacagaacctcagcagacagaggcccctctaggcagcaaagatgttacattgtaagaggcctcaaggcattaactcgagtctcctttcttttctttttcctctgtaggaaccaacatgcatctaatcttctaagactccctagaatgactttaatacaatggaacaatattatctgtacttctggtcacactggagacttttcagggaattgactgggtttctcctccctatagtttattgttagtggtggcagcacctgcaaagagcagagaaaaagaggagagagtgccaccccccggcaaattagtaatcaggatgttgggtactgagaagagatgctctagaagctttatatatgtgaattcatttcgtactcctatttacctgtgaagtaggcactatcattagtttcattttcaggaggaaatggtcaccaaaagtggctcagcaacttgcccaaggtcacagctagaaataggaaagactggatttacacccaaaggtctggccccagggactatgtttccaactcctataccactcggagaggtttcacagagcagatggtgaagggtcagcaggagtggcccagtgaacaaaatcctgcaaggtcggcacagcctgagggggcaacagcacagcacccctgagccagcagggtgagggcaagggtgaagagcagcaaaaggtgccggagggcagggtgagccttggtcatccaaaggcgttagcaccccagggccgctaaagtaaacattgatcatacgtaaaacctttgcttgcacctcttccaatcagacctgccactaccaaaactctccttctctatggaaattccagagctaccttttctactgagccacgctaaataaagagctgggacttacttcgcggaaaatttgggagccaatgacaacattcaggctggacaacaataaattcacaactccccttggccatctctgtcctgggcccttgctgaccggctccacctggaattccatcccctccttccctctcacccccaggacccgaccgtcccaccctgtgtgcacatatcatgctctgtaaagatcatctgaatgtacacgtaggatgtcagtttgcttcttgtaagatagctagtactgattataaagaaaacaacaattccagattgtcagctcctcaagaagggccctgggtggggtgtccagagagcagcagtgaatgccccttaccaccagacacaaagcctggcactcaggtgttctctgaatgaccgataggtgccattagtaagatttataattgagctaatactttgcacaatattttaatgtaagcaaatgcacacacacaaagaactttgcaaagaatggaatgaatggagcaacaatattctccacattaagtctccaacttttataatagctttattgacatataattcacatgccatataattcacccattaaagtgtctgactcaatgtgtttataattgtggggctgtgcaacaatcaccatgatctaattttaggacatttcttcaccccgaaaagaaacccatacccattagcagtcactccccatattctcctctctccaatgcctagcaaccactaacctactttctgtctctatagacttgccgattccagacatctcatataaactcaatcatataatgatttggtgtcttttgtgtctggttctttcactcataatgttttaaaagttcatccatgttgtaacgtatgtcagtactatatttcttcatattgccaaataatatttcatcgtatggagaaaccgcattttatccattcatcagctgatgggtatttggattgcttctactttttggctattataaataatacttctatggacatttgtggacagatttttacagggatgttttcaattctccagtatgtacctaggagtagaattgctgggtcaaatggtaactctatgtttaacatttcgagcaactgcaaaactgtttccaaaacagctacaccattttacattcccaccagcaacgtatgaggcattccaatttctccacatcctcaccaacacttgttattgtcttttttatttcaaccatccatagtaggcagacctcactgtggttttgattttcattttcctaatgatgttgagcatatttttctgcaattcttggccatttatcttctttggagaattgtctattcaaatcctttgcccatttttaaataagattatctgcctttgtactgttgagatgtaagagttctatacatctcaatacaggtcccttctcagacacatgatttataaaaatattttcccattctatgagttgtcttttccttcaaatctattattatagttacctacagccttcagaggtaccaacaagaaacctttacaaaaacctaaccttcatcttacatcttttacaaagcttacgaatttgattacaaatgttcttctaaatgccattatcttcccatccggtttcttgataagccagcctatgctgaagccccagccattgctagatacccaccaccgatagctgggtagcaaactcctggataataaataacagtgatatttaccactgacattctggcatttcagaaattcaatctgtcttcccaatgccttattttaatggtttttacaaaaaaaaaaaaatcatactattactagatggcagaacctaatgtgtgtttggccagcctattttctttaaagccatgctgacaatgattgttaaaactgctcccatgctagaatgctcctcaattgtttccgtcttgacacaaggtcaatggggactagagtaatgaagaaataaagcaaaactgaaacattttaatttggggtctacaagactatattaacttctagcaaattaaatggatgagtggtttgcagccactgacatttatatttcacgattagttctctaggccccttattctctctgcgccattaacctttagggtgtagctctttgtcagtctcacttcaattatgctttcgagggattatagaattagcaattccagttttgatggcacgagctctgtcaaatcagagagacagatgtgagctcatgtaactgagaggcttccatctgttggactgagaactgaaacctggaaaggctcttgtatttcctttcttacgcttccttgggctgttccagcttggaattacccatttacttacatacttggtatttgagcaaatatcttaaatagctgaggtagcaacctttcttgccaaaggtggatggctactcaccatccaccttttagttatggattccaatgctggtgacagaggagaaagtgatgtcacctcatacatatccaaatcctagcatccacaggaacccacacagaatcaaagcccctcactaagttaacaggtcatccactgggatcacatcaaggctctgtcgactggctggaaggaacagaaggaagagcccatggaacagaagcagcaaaggattttattttcagcagagtgaaaattaggtgttgtatactaaagagaaattagtcatcctttggtatatatactcaggggattggttccaggaatcccaccaatggcaaaatccacacatacccaagtctcaaagtccactctgcagagcccgcttataggagaagctgggcctctacacacatgggtttcacatcctgcaatattttctgtctgcaattggttgaaaaaaaatcctgagtcgaagtggaccctcgaagttcagatggtattgttcaagggtcagctgtgtattctttctgtcagggttttctgtaagttgggaatgctgaaaatttctacaactgtctaggtctaactgtctgcaggtgacaaatgtatttctgaaaattagatagtaaattaaacctgatcgtgatttaaaggctctgctgagctcatatgtaaagcaaaagtggttctcagtttaatttcaccaatctgtgaaaattttctttttttttttttgagtcaggatctctgtcacctaggttggagtgcagtggtgccatcataattcattgcagcctcaacctcccaggctcaagtgatcctcccacctcaacctcccgagcagctgggactacaagtgccctccaccacgcttggttaattttttgtattttttgtagagatggggttttaccatgttgcccaggctggtctcgaactcctgggctcaagtgatcctcccacctctgtctcccaaagtgctgggattacaggcatgagccacagcaccggggcaaattttccttattgtttttcatccagccactcctatttcatgtctagtacaatgctttccaaagtgagttcctggatgacctacgtcagaatcacctaaaagacttatttaaaacacatattcctaggtctggctccagtcctaataaaaagttgtccagggacccccacgatatgtcattttagcgtgccccaagaggtgtctcttctcatgcctcttccactttcacaactgatcaataccaagatcagccaacaccacatcagacatttctaaggacgtgtcagcagtgacgtggcacatgggagaactgatgatgtatctcagtactcacatccactcaggaaatgcctgatgaacgagtttcagaaagcaagatttaggccgtcctggttacctcctgccagcactaacacgtgaaacagctcaagaccagctttaggagggctcacctctattttcaaataatgacgtctttctctaattttttttttaatgtttgcctcttgagagatcagggacttcattaagtaaccctcccatgcctcagtttccccatatggaaaatagctatactatctgctgccttctattcctataaggcatacagtcatatacttcctatttgtcttttgcacaacaaaacaactcattccccaaaagctttgaattaggcttgcaaacatagtccttaactaccaaactgtaaatttctcaaagtctagaaaaatgagaggggcaaggaaagaaacaaaaagaaacttaggcttaactgtaccagctagtctcaacttgatccgaaggaacactgctagcattctctcagctagcttctcacgattacatttaaaaccaccacaaagccaccacgatcacgctctgagaggccgccgcaggtaaacagagggatagggtaggaacagcccagcataactgacaatgctctttaggggatctgcagatctgccttctcaaacatctcatttcacttcatgaatatttacaaaatatttgcaaaagaagaactaaggcaatgaacatgtccagaaagaaccacatgctaacttctaaaggtttctctctccaaaaattcagtagtgccagaggcctgttcttttgtcccaggttgtttttcaagtgctacctcatgacagaatggatcactcataataactagatgttagcatctgtgtcacataattcatctctggcagtccacttcttttaaatcctaatagtaggcctcctaaataggattgctagcatttggcatctcatttgcctctatgacaacaaaactctagaagacgtagtttataatacattatggtttcagctgaatgacatttggttctaaggtctttgaaagtacaagtttgaaaatgccaaattttatctatatccatatctatagctccatctgaaattagacagattaccaaacagaaaatgtcactcagattctaaaaataaaccatgctattgctccagacaggttacaccagagggttaggaccatgacattttgctggggttcaagtgcaaatcagcaaacaaaatggcatgtttttctcttcctttttcacagctaaagattagtgaaggcagcattgtagtctgtgtaactgctcaacccaacctttatccaggagctagtattgcttctttaaaaacattttttttttttgtaaataaaatgtggtacagccatacaaggaactactactcagcaataaaaaggaatgaagtaacaaaagaccaaatattgtattattccatttatatgaaatgcccagaataagcagatctatatagacagaaagtagatctgtggctgccagggaccagcaggacgggggaatggagagtgaaacgggtcaaggtttcttccgggagtgatgaaaatgttctaaactttgatcccagtgataactgtacaactctgtgaatatattaaataccattaaattgtataatttaaacgaatgaatggcatggtgtacgaattatatctcagcaaagctgttaaaaatcttaacttaaagaaactatcatcttttaaaagctatagcagaaagagagccagcactggagagagtaaatatggtggcttttcacctttccaagaatctcaatgagccctgggcattgcaaaaattagtcaagcaactgtcacaactgcagtggtaaccaaatacggaagctgaatcaaatacggaaaggaaattcttttgaactcaaagacacaacctttccaaaaaaatacactgcaagcacacaaacagaccacacaaagtcaaaacaaaacaagtacctgtgtgggtggaaatgtatccaagtgccactcttttcttcaagtctttcattctcctcttattacttcaaagataagccctggatgggcaggaactaagttgttttggttttttctcatgacacaaaagatctggcagagctggagatttcattaccttgaaaggcagtaatatttgaaggtaccatgactattccctgaacagtgctctaaacacattgtggtggctaagagctatggttatcccacctcttcaatgagaatggggcattcattctacagaaagccacttacagacaaaatgggtatcacatcatccataaaatgaagtaaagaacagttggctgaaacttcccaaacagcccgttactccatgtgatataaatgggtttgcaaagctcaacaaaggaagacaagcactaggaaggcaaagccagtcttcctagcatgataaccaaaagtgtctcagccctctaaagagctctaggatctcaaatcatgtgcacaatacagagaagtgctaatggtggaagggatgcacaagagatggtagatgtcttgccctcaaggaattcatattttagatagggtggctgggggtgggggtggggggcagtgaaactggattattttttggcaaacatgcaaacgagtgttatcacttaaatgtagtcatactagaatgacttgaccctattccaaataaaattgccactgattaaaagacacttgcaaactccacttgtggaactggcttcagaatgacagagaaaaaactagctcttcactttataggcatacttatgtataagtatggcaaggagtaagcactgtgtttgttttatacacacacacacacacacacacacacacactctctctctctctctctctgtcggtttttaaattactggccactggtgagaaaaccatcaatgtgtccaggcgcagtggctcacatctgtaatcccagcactttgggaggccgaggcagttggatcatctaaggtcaggagttcgagaccagcctggccaacatggtgaaaccccgtctctactaaaaaaaaagaaaaattagctgggcgtgggttagccgggcgtggtggcaggcgcctgtaatcccagctacccaggaggctgagggaagtgaatcgcttgaacccaggaggcagaggttccagtgagccaagatcgtgccattgcactccagcctgagtgacaagagtgaaacttcatctcaaaaaaaaaaaaaaaaaaaaaaatcaatgttctgagaataagatcatcgcagtattacgttaaatgtgtaattttccaaggtaactattacttatttagatgtgtaggttgttacatttgtttgcttttcatcagtcacatttacattaaagacaataaaatacaaagtgatataactgccaaatgtatattacagactataaactcaacagaaattcaaaagaggatgatataaacatatcacacattgaaagaggacaaagcatcttgctaggcactgacattttaaaaggttaaagtacaaaagttactttagataggaggaataaattctgctgctctagtgcataggaggattactatggttaacagtaaaagattgcatattctaaaatagctacatgagaggcttctgaaggccctcacaacaaataaatgataaggtaatgaatacaagaactacactgactggatcattatacaacataaatatgtattaaaacatcaaattggcccagcatggtggctcatgcctataatcccagcactttgggaggccaaggtgggcagatcacctgagttcgggaattcgagaccagcctgaccaacatggagaaaccccatctctactaaaaatacaaaattagccaagcatggtggtgcatgcctgtgattccagctacttgggaggctgaagcaggagaatggcttgaacccgggaggcagaggttgcggtaaaccgagatcgtgccattgcaagccagcctgggcaacaagagtgaaactccgtctcaaaaaacaaaaaaaaaaaagaaaagaaacatcgaattgtaccctaaaaatagatacaatgtgttgactaaaaaataaaatttatcaaaaaaagtttaaatgttttcccaaatatgaaaaattaataagcatttaaaaattaatcaatctcggccgggcgcggtggctcacgcctgtaatcccagcactttgggaggccaaggcgggcggatcacgaggtcaggagattgagaccatcctagctaacacggtgaaaccccgtctctactaaaaatacaaacatttagccgggcgtggtggcgggcgcctgtaatcccagctattctggaggctgaggcagaagaatggtgtgaacacgggaggcagagcttgcagtgagcagagatcgcaccacttcactccagcctgagtgacagagcgagactctgtctcaaacaaaaacaaaaacaaaaaaatcaatctcactgctaataactttaaatttaaatatgagatactactttggaccaaacaattgccaaagattttggggaaagcatgctgattagcatgcagtaaaataggcacttccataatctattaagacctttcaaatataggaaatatccttaatgaccaactacagagaggtgtttgcataaatgatgccatagctataggaaaaataagtagacattaatgattttttgtagaatttcaaaaccaaagccaattttcacaatactgaatgaaataaaattcagaatataaaattttaaacacactatgattttggttgtgttaaattatatacactcaggagaaaagactgaaatcaatagtgcaatatggttgtttctggggtgtagccaatcttttcctattctttatacatgcctgtgtttttaaaagattctacaattctctatatttctttggtattcaaaaataaaagcagacaataagaagaaatattcttcccaaaacatgtagattgaaaaaaaaaaaaggttaaggtccaattcctgcctataagatcttccaggtaaaatttcataaaacgaggttgggccacaccttgaaagatacatagaatccacatagctggggctggaactgggggctcacacctgtaatcccagcactttgggaggcagaggcaggtggatcacctgaggtcaggagttcaagaccagcctggccaacacagtgaaactaaaaacacataaaattagccagttgtggtggcaagcgcctgtaatcccacctactcgggaggctgaggtaggagaatcacttgaacccgggaggcagaggcggaggttgcagtgagatgagatcgctgcactccagcctgggctacagagcgagacgggtctcaaaaaaaaaaaaaaaaaaaaagaatccacgtagctggaaaggagtagaaagggcattccaaatgggagaaaaaactcaaagaatctaaagagggaatagttggcaaaccagaagataaatcaaattggagttacgagagcttaatccttgagctttattttaacaggccagtggttggatgaatcactaccaaataagaaataaagcaaagctatactaagctaaaggaaagtgttctcaaaaaagagtcttctgtgccacgttggtgttttttcacatccctctatctggctgcctgctggtttccatggcttagatttacccatttggaaaaacaacccctcccctgacaataccaaaatcactacctctgccatgaaattaggcaagaaatatacatactccagcctctaatttagacaataaacttgccaaaagtacggaatatatctttttttcacatagtaccaatcaacagtgtcataataggcattccaataagtaatgaattacaagttaacaatgagcaacaccttaatattgtccataaatccccaccagaactgaaattttacaagttggcaatatcaattattggtaaagatttagagttcctggccgggcgtggtggctcacacctgtaaccccagcactttgggaggccgaggcaggtggatcacctgaggtcaggacttcgaaaccagcctgtccaacatggtgtgaccctggctctactaaacacacaaaaaattagatgggcgtggtggcgggcgcctgtaatcccagctactggggagggtgagagaggagaatcacttgaacccaggaggcggaggttgcagtgagccaagatcacgccactacactccagcctggacaacaagagtgaaactccgtctcaaaaataaaaaataaaaaaataaataaagatgtagagttcctgaaatgcttatacactgctggtagaagagtaagatgctataaccactttggaaaacagttgtgcagttgcttaaaaagttaaacgtacccaataatccggcaattctactaagtatttacccaaaagaaatgaccacatatgtccacaaaaagcttgcataaaaatgttcgaacactgtacaacaaagtgtacctcttaaaatggttaaaataatacgttttatgttatatatatacttggccacagaataaacaattctgagcaagttcattcattatagttgaaaaccggaaacttaaaacatcatccatcaagtttagaagagatgagcaaattgtggtatacgcataagacgacaatgccaaagaacaaactactccaggagcatgcatgaatctcagaaacactacgttaggcacaagaagctggatccaaattactttatacgacgttcaagaccaggccaacctaatatataactgcagaagccaaaacagtggttctctttgggggatgtgcgtactgactggtaaggaagctcgaggaggctcaggggcgatgagaatgctctccctcttgatctgggtagtcagccccaatcaaaaagactattaacaataaatacagaataatggaggccaaagtttagacagcccaaggccaaccactcataaccaaaacttaagtcatcctgatttccccaaacactaaacctaaatataaaagaaacacaaatctgagttttttgtccttatcagcagataaggacaaaaataaggtttgataaggatcaaacccatcaactaacaacaaatcagcttaaacagctgtctgccttaaggatctatacatgacagccattcatgaaaaaggtcaggtcattcctcctttatgctctaaactgcaccgtaactgctataaagtaagactgtgacatttttgggtttgaggtctcccagtccatgaactctcctcttgtatgtatgagaaacacttaaaattctaacttgatctaattttatgtttgacaaaacatggggggaaaaatttacaaagctatacccttaggagttcatcataattaattatgcctcaataaaaataaaggaagaaagaaaacagaacaagtggaaaatcccagtccattatcccaattaagccccaggtttgcattttatctagccctcacgaagtactccactatcatgaggtcagagctcatcatcagaaatccccctcggagtgctgtagtgtctgtcctattcaaggcagcgttaggtctgaccacagtattttcagaacatacaactaatccatcaatttcttaagccttttaaaattcactgaacttggccgtgcgcagtggctcacacctgtcatcccagcactttgggcaggcagatcgcctgaggtcaggagttcaattccagcccagacaacacagtaaaaccctgccttactaaaaatacaaaaattagccgtgtgtaatggcacgcacctgtagtcccagctacttgggaggctgaggcgggagaatggcttgaacccaggaggcagaggttgcaatgagctgagatcgtgccactgcactccagcctgggtgacagagcaacactctgtctcaaaaataaaaaaaaaataaaataaaattcactgaatttaaaagttctacatatatttcattcctattaagacccaagacgaaccatttcatctttctttttaaaaaaggctaataatgcttcaataaatgctagttcccagtatagtgacagatacaatggagtgaggcagtctgactctggccatagttaacagatcaaggaaaaaaatcccacactcctaagattccaaagaaattttctgcaagtttccttaatgtactttaaaatccttcagaagaccatggggaaaataaatcatcctctcaaattcatattctgaagtttgaaaataaaagcagttccttttcatgtttggatatagtcactctgaacagtaaatcagctaacagacatcaacctggcataagactcttcataacctgtaattatcttctttatttccctgttgctcatctgtctcccctgctagaacatacactccataaagtcagggatcttgctgtctgttttgctagcagccatatccccagcacataaaacagttcctggcacataatgggtattaaatattttcccatcagtgatcagttcgtttagcagactgtccaaagtcaagtaactagaaagcaagacgaacaagggcagctatctgtaatcaagcagccaacttcaaatgttttcctacagaagctaagtcctaaagagtttttcttctctctcttcccctcttattaatattcctccttttcccagctatctttcctgcctctaagaacagtattctaagaattaagaaactcacttgtatcaccaactcgctgagtatccttgggctagtcaggcaatttcaatgcttatctttagtcaaaagacactggagtcattcataaggagacaacacttgcctggtgtgaagaacgagtagctgcaagacaaaatcctagccctcccagaaattagagtaagccagacagaggagggaggtaacacagcgagataaattccatggcagaagtatgcacagcatgccatgaaaatacaaacacctaatccctccaagaaggcagaggagggccaggagcggtggctcacacctgtaatcccagcactttgggaggccaaggcgggcaagatcacgaggtcaagagatcaagaccatcctggccaacactgtgaaaccccgtctctactaaaaatacaaaaaaattagctgggtgtggtggcacgcacctgtagtcccagctactcaggaggctgaggcagaagaatcgcttgaacctggaaggcggaggttgcagtgagccgagatcgcaccactgcactccagcctggcgacagagcaagacaccgtctcaaaaaaacaaaaaaaagatgaagaaaagaaggcagaggagaggagggtcactttccagaagaagcccttgcccttgagggactaataggagccacgagaaaggaacagggagatttcagatagaggcaaaagggcttactcacaggaagcagtttcacgttatgtggactgcagggtgtgagcgaacatggaaagtaaggctgaagaggtaagccggaatgatattctggtaatattacagatgtaaacctagaagaagatgagattagaggcagggagcagtttagagattattttagcaattaacaggaaaattaatggagacctcgtaagagaggagttcccaggacctcttcaacctattccaccctttgccccaggtgaccacgctcactcaaagcttcaagtattctctatccaagtatctccagcagcagcctctcctgagctctagaaccatatacccaactttctattatttatctcttcttcgaaatctcagagcctttaaactcaacgcagccgaagctaagcctatgagctcaccccagaacctagtcctcttcctgtgtttcctgtctctgcagatggcagcaccacccatccgcttgtaggagctggaaacctgggaggcacccttagtgtctcctacgtcctctccctcatccgctgttcaatccatcaccaatccctgccaggctcctcccctaaggatctcatacgtctatccactgctttcctctgtggccaccgtcagaatttgccttacccctatctcttgcctaagccagtgcaccaggttcacatcctctcctattactatttcatctcttattcccttccagtccattctcaaactgtgacaaaagtttgtttttagtgctcatcagcctgcgtcacccttttatgcccgcctactcaccccgaggagctccatcaagcccctcttcactggtgttgctcaccatatgtgcaccagcaccttatttctgaaggaatgaggactcaggttttttttttttcttttgagaccgagtctcactctgttgcccaggccagagtgcggtgggatgatattggctcactgcaaccgccgcctcccaggttcaagtgattctcctgcctcaccctcccgagtatctgggatcgcgcaccagcatgcctggctaatttttatatttttagtagaggcggcgtttcaccacattggccaggcaggtctcaaactcctgagctcaagcaatctgcctgcctcagtctcccaaagtgctgggattacaggcgtgagcaaccgcccctggccaggactcagtatttgagcaaagggaggcaagaattttaagaatttgtaaaaagtcagtattgcatggcataaagagactaaggtaaagactaaaaaagactgaacttgccactaggatatcatttagtgaccgtgtctggaacaaattcaacagagttgtgggagcagaaatcagaggacagcagattaagagggaaagggcagaaagggagtagaggtgagctggccttcttccaataacgtggatggcaaggacgatacagtctaatggctggaacaaacacaagatttagggaagggtttgtttttgttttaaagttgggagagacttgtataggagcacatgatgaagggaaagaagcaggagaggaagaggagggtatcagaacagaaagagatctgtgagcaccaacagaacaatctgccttcatttcccctgaaggaaggaacatgaatggtgatgaattcagaagagcttgcaggcagggaagcaacatgtggttcttttattttctctaagatatagagcagattcttccagctccacaagaaggtcctctcccactcactctctctttattggacaaaatatagaaccaaatactgtatgcactgtatcaaacaccaagagcgcaatgcttgatgtccactgtgagttctggaactttaccttgttccctaccagtatcagccctcttttattggtatgaagcctctaatagaaaaaagcctcccagcctggtctccagaaactggtgttaactgctccgaattttgaattcagcagagctgtgctagaaaactgcacataaggtttatactgagaatgacagctattttccattccctttactttctagtcggtagaacttaaagcctggcacagctgctattacatattccttaaacagcgaaccagatcattctcgtgggtgattttaagcattagagaagaggtcataacttttcagcaggaaaataaaacaaaggttctttctggggtcagccaatagtttatcagtggctcatcagaaaaacaatagtttaaaaggacttgcgtagttaagaatggaagaacatgggtaaagaaaaaaactgctgacattaaaatagaattttaaattaatctcttgtcgcgttaatagtactgccatataatggaagatgcatttattttctaaggggaaaatgtccagaaacttgcactcatcactcccttaactgttatcagggaagaagtgtagagtctcccagctggattatgggtagtgtaaacatctttgctaaattgcttggcagagtacatctgcatcaaaccattagagtctggaattcactctattaaaatcaaatcattagccaagaagaattaacaggaaactattttcatgcaaaacagatataaaataaaaatcaagagcaatacatgagtaattctttttcattcacaattttagatggtgcataatgcagagtattgttttagaaacgtgctgctctctaacagccatctctatacaatatagggtattgtttggatactggagcaatttaagctttttctatgtatccaaaagtccctggattaagatccaaagaaacctggcacagcaacaaagttgacttgtaacacatctcagcctttaagcaaattgtttattaatgcagcaggaaagtcgctgttcaggccctaagtaagctatgtatctccggaagtgtcccccatgttgcattctccaaaactgtgcagaattttctcctagttttccattacaccaaggatggtgggagggcttcaacaggtgatgaagaatgtgaacaaaatactaactgaaaaaaaagttcttcccaaagtatcaccaactctgtttaataaacagtggagctacagatgaatgagaagggaagctgggacatatattatctgtatataatgtctgtatatcccacagccaagagttctcacactcaaagagacgctggcttcacatggagaaaacaacctctcaggatgtgtgcactactttaaaagatctcacaaaaaagatacaaaagaaggcatacaggcatctccctatacagggtaaaaaaaaaaaaaaagctagaatttgtttagaattagacacatggtagtaaaggtataaagaaaagcaagttacaactgtggtgaactcttggggctgggagggatctgatcaaaagataatacctggaaggggcgatttactatttcttgacctggccatagtcaccgggttgttcatttctctaaccataaaatacacatttttatacacttttctgtatgtatatttcattataaaacatgttgagagatcgatccctaatacatttcttagtagagtataggcattccataaatgtttaataacagaatggataacaaaatggtactagtactaagttttctctaatcacttactagatatatttcagtttgtcatgtttacagacttctttgcaaacaaaagagtgaaatattaagagtttggaacgatcctatgcatagcaacacattaaagaggacttttaagaatagattctctatttcatttagagtaaataaacattctttcaactagtcatgattcacattgataggattaaaacattctatacataataccttgaaattaaaacaatcaacagaattaaacaacaatgcagaaaaggcaagacagcaaagcaaagtgacaaaaataattccttcgaacttacagaacatgtaacattcagaaaggaaaggagagcaaatgaagaaagcaaaatcattttcaggtcctgcttttaaaaataagcaaccacggttaggattttgttgtggagttggggggtgggaaatgacacatgagttcattaaaaaataaaagacggagagaaaactgttttggaatacaatgcagagcaagtcttaaaaaacagttgccatgagcttcaatgtgcaataataaataccactaaatagaaaccgccactgaataaacgtcagatactttgagatgacaaagatcgccagaaacattccctggtccgactgtttttatatatttgtgtacatgcgtaagtgctaaatctggatctaatttcttcctgaaaaaatccagttttctgcaacatcctcacagtcagggagaactaagctatattgagaagtttggaatctcctcacgtgccaaggaggattgctttctatctttaccgcatgttttaaaaaatcttcacagcaacacatccaggcaccctaggaatacaaggccacgcagacaatagggaacggaggaaggagggaggaagacaaacctggcctccagaaggagccaagtgtaggctccaagagataaacagccaagtacaataatctttcgagaagcgggctgagaaacaagggtgggagctggaaggaagggtataatcacaccttccttcacaaactgtaattaggagaaagacaccagccaggccagctctctcgcagagctcctgggctcacctgggcatgttttactaaccaagctcctcctagtttctttctctctctctctgtctcccccttcctccctaacccccactggcccccactccctatcctttcctgcaagtaaaaagctaaagtaaaatgactttccacagcaaaacagttacagatgttctacctcggaatacatcccagatcaagagctcgtcacttgatatgcagggctggggaccaggagagggtacgaaatggccctgcgctgtggccttttcacctacccaagcctcctaagtttcctgaaggttctgagctcattagacaaagaacaatgaagccaggactccactcaaccgctggtggttagactggtggaaaacaaaagatcacagggtctcactgaactcagcaactctccagtgtgcgtcttcccttccattccagaaaattaatttaaaagttgcccgtgatgaaacaagggataactgtgcctaaaacaatgaaccgttctaaagcttgaagtcggaataattcgctcttaagctttgagaggatcacactatgcaatgtattcctactttctcccaatataaatcacgctattaaattaaaaggagagaattcttccaccaaattacacactaatggctcttaacccataattaaagtatcgctaccagcagtgtaaagccccagccagccagggctcagacccaggtctcagccccagggatgatgtcagtgcagcgacagcgatcttgaggaaagcccgtggtctaacctgtccctgtccctgctccctggggactggctctggagctggcatccacgcaggcctcctcctctgcacaggcagacaaaaggaaagcaagcccagtgccagagcagcacgaagagcaccttccagcgaggccggtcactcagaggtgtctcacctaccctttccccaacatcacaacagcctcggaatttggaccagcaactggcttcagagcaaggagaagtgggagaggctccactgtgtgctgtaatccagggtgttatccccgtgctaggccgtgagggcacccaggacggggcatgaccctaacatcacggagctaatgaggagataagacatgaaataagcccggcgcggtggctcacacctgtaatcccagcactttggaaggccaaggcgggcggattacctgagatcaggagtttgagaccagcctggccaacatggtgaaaccctacctctaccaaaaatacaaaaattagctggtcatggtgcagggcacctactgtaatcccagctactagtgaggctgaggcaggaaaatcacttgaacccgggaggcagaggttgcagtgagtggagatggcgccactgcactctagtctgggcgacagagcaagactccgtctcaaaagaaaaaaaaaagacatgaaataattctggagaggcagcacggcatagaagattcatagaagagtcaaaactcaattcaatcctgccacaaactttctaaataaactaaatcaactctctgaaaaacagagtttccctctctgagcctcactttccttggtgaaaacaaggcaaaggtattagatgatgtctgaggccctggatagctctgcaataattagatagagaatacaaggcagtatataatcaagtattaaattatacaggagcaactacagctgccattgagagcttgcactgatttttttttgagtcagccttcattctaaaccacttcctgaaagcccactcagaccctgtgctaggattcagggatgcagcggtcaccaagacagaatgctctgccttcacgaggctttcgccagtctagtaaggtattctcaggtgttcagaggagggaaaaaatgagggctggggttggcctatgacctttgcatggagacagaggcaaaactgggcttcaagtgggtatcatctgagcattcagtggggtgatggacgcagtggttaattgctgagtacggtagtaataagccatgaggttctgaacacatagcacaagcccagttctactaatccgctcatcattagtgaagggaattagttagcttccagaagtcagccagacttcgattcttccggccctctccctaacgtctccttctcccaccccaaacctgctaattgtggttaactttttccctttattcttttcagttattcttgcagacaactatggtggagggcaggagccaggaagcagttaccaaggagggagtccacatctaagcaatatggagtcagtcaggaaggaagaccttgtatgctacaaggtaaacggctaaaaagatcgatttgcgtattaagtcacaagagaggtttaagaaagacagtacaggctgagtgcggtggctcatgcctgtaatcccagcactttgggaggctgaggtgggtggatcacctgaggtcaggagtttgaaaccagcctgcccaacatggtgaaacccatctctattaaaaatacaaaaatgggccgggcatggtggcaggcacctgtaatcccagctactcaggaggctgtggcaggagaatggcttgaacccgggaggcagaggttgcagtgagccaagatcgcgccattgcactccagcctgggggacaagagcgagacttcatcaccaaaaaaaaaaaaaaaaaaaagaccagacacatggtttattttagagtagagctatgtctcatacaactaaggaatatggtataatttagctggtaagaataattaaccatccgcatcttaatttttaaaactaaaatgtcataaaattaatttgtcccttattcttaaggggcatgaaacttgactgtgccctaaatgaaatcaaatgttgcctaccaacagtacattccattttccaaacaacttccctggaatgctggggagctgatatgtttaaaacgaatattctccaagtccaagtgttggattttaaagaaccataacctttccaacttttcctacaaaaaaatcccgtgtgtgatttatgcccatcttcaaaacaccctctggagttcagaccagatgtgtgcagtgtttacactgagaaaaccactaggacatcaacaattcactataaacaccactcaaattttgctgtgctttccttcatttcctctgtatttattctggtgttaaaataatgttaactctcataataaggaaaataggagcagatgtttaaaccaaacagacttcagcccattatcccatatagctactcaatcttcaaaatcaaagtttcttcctcccaaataccgagagagaagagcagagcagagcactctagtttcctgggtgttgcatgctacacaacaactcgacctgggctcgctgtccgtaagttggtcctcaccaatcggagacaggaaaaactaatctggtatcaatttcctaacaatcttatatttctctcttaggccattatgttttgtttttaaaatatcgtattacttgttggcaaagacaatacaacagaaattgcctcagaagtttttctttcttgttgggggaagcggggatggttaaaaaaaaaaaaaacaagaaaaacaaaaccctgactacaatgtgtgaatgtcacgggaaacaagcccagcaatggctgcttacggctttctaaagtcggctgccttttttaagtgagttcagaagcaagatgttacttaacacatcagatgcaaagaaagaaattcacgaaaattctcatagcaggaactagtaggagtaaagaaaaacaaatactctttttaaaaaacgttaaatatgagatcctcatccatagagttttaaaaaacaacgtgaatgagggttgttgttgttttttttccttgaaggggaaaaatactcttgaaagggtgagttttcaactgattaggaaacaggcctgaagtttttagattaaaaaaatacaagtgaatcaccctcccaagtttttgtaactgttttctttttcaagagaaatgtcccgtgtattattggagaaaaaatggaaactgctcctgctgaatgagaaagagaagagtcccggatgtgtgtgtggttacaacagaaaacactcttcctgccaggccgaactcccccggagatgccctcggcggcagacccagggccattgccactttttcaaatcgcacgtagaggatgtccgagggcttaagaaatagatttttctctgactgctaccagagacagttggaaatacaagacagtgggggaagcacctcgcgggcagtaggaggtaataaataacagttcggcgcggctctctctttttcagggcaggctgggggtcggggtgttgtgtaatcgctcccacagggagcggagcgcgaggaacaccccccagtgtcagcgctccccgggctgcacaggaagcgccagcgagacaaagagcccgcctgtgctcgctgacacggtgcccttccggccccacgcgggagagggacattctccgctgtttgggacgctcactcgcgagcacaaaaactcgctgtaactttggctccccctccgtgagctgcagggcgccgtggcccacagcagggtacagtagacggtgcaatccttaccagcccctcccccaaagaggctcaacttttaccggcgtcctacaagtccttcccctaaagacaatattaacggaaatcaaaaatacatacattttaaagagttaaaaatgtgaggcgcgagtacgttgcaagcaacgagcaaactttgaagggtttctacttcactgcctccccgtccagccccctccaccgccccccgcagcctgagatccgaacacactcggtgccgaaccgaacctaagaaacgccggcctttcaagtgccctacaccccggaggaggacagcgggcgcttagaaggcaggcacccagcacactgaggaggagtggccgggacgagcaacgggcagtaattctacaacgggacatctaccttcgtagcacagaatgccgatattgttgttcatcttgtccaagtactgatagttcaacaggtccatcttcataaatagcatttattgggctagcaaagaaaaccagctctttgcttttgccccaaaagagttaagtttcaaaaatcaattgttgctgagtagctcctggctcttcaacttcacaaaggcagaggcccagcctcagactatcaaaacaaagtatgcaaaagttaaaaaaaaaaaaatcaggcacaaaaaaatcgagctcacacgaaacccttcaagggcttactggtagacggtgtatgtactgtatccccgatcgagtatgaaaacagcgtttcagaagtccttacaagtccttcctggaaatggaaaagagtgaaaaagagaaacgcgcagcccgtttcctaggacaaagcggcgccggcccctctcacagcccgctgcaagccggcagcgctgacatgagggctatgcttggcatgactcctatgccgccgcttcctcttcccgcaggaggccgagcatgctcactgcgccgcgctgccgaggcagggagggcttctgcacaggatcagcctctcaatgtagcaagtgttggaaagaaagagaaaggggagggggagagactctagagacggggccttggcagagtggctcttgacaggaagcagccaagccgctgcaaaaccgtaggaggaaaaaagaaaacccaggaagtttctttttcaggagctaagtacaaagtaaaaaatccatcatggaagcaaactcccatggaatgcaactttcgtgaaacttcatgttggggtttcggaaacccaaagtgctagtgatgcataagccatatatatatatatagtgtctttgtttcttttaaagattgttttataatatccatttacactttaactggatatttaaatttctgatgttaatgttacatatagcttcttccataatccccataacaactgagatggacagggcaaggagggtatcaccctttcacagcagaggaaacaggttcagatggattaaatgactggcccacagcccccaaaatagttgacagaactacttttaaagtgttttttcccacctaatgttataattttatttaaaaaaacgagggggccgggtgtagtggctcacacctgtaatcctagtcgaagcaggcggatcacttgaggtcaagagttcaagaccagcctggccagcatggtgaaaccccatctctactaaaaatacataaattagcctggtgtggtagcgcacgcctgtagtcccagctactcaggaggctgaggtgggagaattgcttgaacctgagaggaggaggatgcagtgagccaagatcgtgacactgcactccagcctgggcaacagagtgagactttgtctcaaaaaaaaaaaaaaaaaagaaaagaaaaaaaggagacaaggagaggagaagagatggaagagtgtttaagcaaatagggctataatatcaaaaattaaaagtgtacttgaaattatagagggaaagggtaaaattattttcatttggcatgtatgtcacccacctgtgtgtaagaagctagtggcatgcagctgtactatttgctattggaagaacttggggcttaaactttgattacccagtgcctagcacaaccaagttcaggtgcccaaaaactgtttactgaacgagtgaaccactgaatgttcagttttcagcacatcaagaacgtgttaacaaaatagaaaaaaaaaaaacaaaaactaaacatttgaattactattctaaaaatatatttttaatattccaaaataatatttgaataaataatttgaaggagttgtatgttaaaaatccagcaataggccaggcgcggtggctcacgcctgtaatcccagcactttgggaggccgaggcgggtggatcatgaggtcaggagatcgagaccatcctggctaacacggtgaaaccccgtctctactaaaaatacagaaaattagccgggcgcggtggcgggcgcctgtagtcccagctactcgggaggctgaggcaggagaatggcgtgaacccgggaagcggagcttgcagtgagccaagattgcgccactgcagtctgcagtccgcagtccggcctgggcgacagagcgagactccgtctcaaaaaaaaaaaaaaatccagcaatagttgcattgggtttattaggcacactcatggcaaggtgttctaatgaaatcttacttgggagtccggatgcggtggctcacgcgtgtaatcccagcactctgggagactgagacgggcggatcacttgaggtcaggagtttgagaacagtctggccaacatggtgaaaccctgtctctactaaaaatacaaaaattagccgggcatagtggcatgtgtctgtaatcccagctactagggaggctgaggcaggagaattgtttgaacacgggaggcagaggctgcagtgagccaagattgtgccactgcactccagcctgggtgacagaacaagactccgtctcaaaaaacaaaacaaaacaaaaaaactatatgacatctaaatactaaatactgttgccgtcattgctgcaacagtaatcactggggtgacatcaggggaagtaagtaataggggaatcaagatttcacaagctttcatttataagaatatttattgacactatattacatgtaataagctatagtgaaagatatgtatcctatcaattgtaattaaaatacttaatggtatttggtggggagggttgaagaaaactcaaaactcgtaacatccagtatacatgagatcattgcactgaaaacaaacaatatcaggtatcagatttaaatttaactgatagttttggagtactcttactgtgctacgtttttacataaattctcaatcagaaaactttatccatcattgtcccacatggaagagaggtggctgcacattagaaccaggggggagcttttaaaaatcttgctgctgaggttgcatccccaactcatctgaggtgggaaccagcagcagtagcttctaaagtcccaggtgattccaatatgcagtcaaggttgagaaccattgctttcatctagggaggaaaaaaaaaaaaaccctgccttaagatatttcattttattcacttattttgacatgaagaatttttttaatagtaatttaagcaaatgattcaaacaataccattgtagaaaatgaataaaatatttggtaacgtcccttaagggactcagcatcacttagaacagcagttctcagcctccgggtggcaaccattttcgtggacaccgtctcacaggtctaccttgactattgtaacattcccagccacagccaccacgtctttcccgctgatccgggaggctagcacggtgctacccaagtgtgatccagaggggttcgagcaccaggtgttcctagtccccaaaagctagatacagaaacggagaatgaacatttaaaacttttatagcaattcgatagactaattttatgtctctcaaatcttaatattaaagaaatttgagggctgtagttttcgtatttctagttatagggctgcattacattttataaactatcagtctgcaacaaagtcttggggaaaaatgaaacaaacctggtttcacagagaagcttgtgctccagaggggccagctacaacagcccgcctctgcaggctgggagcgcctcctggaccggctctaggcctttccatcccagctcctgacaactttcaccttagtttcaagcacactggatgacctgcagtgagttattccacaaagcacatcagtatgcttctcggtgtgcaggacgtctcttctttcccaacctgtctactcagcaaacatccactcttccttgagacttgtcagaaagcccctcttgtcctgtgaaatctccctacgatcccatcctaccatctcctcacaccctacgccaagctatccttttacagggtaagtagtccttatccaaaatacttggaccagaagtgttttggatttcggaccttcttggattttggaatagttgcattatacttaccagttgagcatctctaattttaaagtctgaaatctgaaatgctccaatatgagcattttcacctgaatgttgtgtcagcactcaacactgttcagattttggagcatttttcatttcagatttttggattaggacgctcaacccataccttatatgtgcttctttcctagcctagatcttcggagcaaggactatgccttcctcaccttttcgaggtcagtctggcagaagtctggcagaagcctggcgcatggtaggccatcaataaataccagctgaataaaatcagtaaacatctaaacggcagattcttcatttccccatccctacttccagcacactctggattatcttactcgatgtcattaggtggctgtcaacatctcttggagaccacaggtccttgcctttaagaaacaccatgtagattctgattgtacttcagggtacaatcagctcatccataaaaaaaaaaaaatactagaaaatatcaatccttctcagattcattcataggataatatattcataattaaagtagcaacaggatagttttgtagggaattggaaagatgggtctaaattttatccacacacacaaatgagatgggaaaagctagttctttttctacgaatgaataagtttgatctatcaaatatttaaaacataaagcaaagaatatattttggagtgttactgggtagagactaggtaggaccagacagatactgtggatataggaatcagaaatccaggccaatggggaagaagtggattacaaaacaaacattactgagaaaagaatccagatagcactttgccttatactgtacatcaaaataaatcccaaatgttttaaagattatttagatgcttttaaagtaaggtttttgctgcaaaaacttacaaaactataaggatatgttcagactatctgatgtggaataggaaaacatttgctaagccagaaataaaatttttaatcaaagacagaagccaccaaggaagatgtagaatttgattgagaatacagattttatgcttttatacatctaaaaacaccaaaaccaagtaaaggcaaaatacaaaactgaagaatatatttgtgtcatatattacagtgaaggataaatgttcttggtattcaaagaacatttaaaaatagaaagaacaaaggaaaaaattgaaaaaccacttgatctgaataacattttttaagagcatgagaaacaaatggccaacacatttttgaaaaactattcaaccttactaataatcaaagaaatataaattttaagtgattttccagctaccaatttaacaaaaagactttttcaatcttatttcttgctggtgaaacaggatgccattggaatctttgctcactgctaatgcagtataaacagataacgcctgtgtataaagcaggttggcacacactagactgttttatgaaaaatgtccatgcctttgtccttgccttggactctacttctagacttctgtcttaagaaaataagatttgaagagtttcataaagatgcttatcatacagctatgtgtaaaatgaaaacctgaaaacctaaagtccaaataaaaggatgcattaaaaccgtggcttatcgatgacagactattacgcagccattacaacaccttcaataatctataatgacatgaggaaatgctatgctatatactgtgtgacagtactacatttgttaactgaaaacaataaaaatcggatataaaactaaaacacacattattcaccaactgtgctaatgtatttatgaaaacatacatatatatataggaaaaagtatacattaaaaagactggaaagtattccaaaatgttaatagtgcccatctttgaatggtgggcattttttccattttcctgaatttctaactagcctacaaatagtttattcttcctataatgaagatgcggataaggaaagttcttgatttttaaaaagcagcaacacaatgaaataatattccctggtgagacataagcaatggatatgtatatcttattatagcttacatatctcatgatatctccttttgatttgggtttaacaacttaaaaataataagaatccaaacatttctttagaactttggaacattcaaagatgtttaagatggggtatctgtctcaaagagcaaaattgacagagacagctctacacttgcagagcttatagacatgtgtacgtgctttttatcttctactgcttactaattatgtcatatgtcagtaccaattcccccaaactagaccataagcttctagagggaaggaaagctaagcctcagtccttagagtaaaactcccccacagcacacaagtgctctatttggtttggtttggtttggtttggtttggtttggtttggtttggtttggtttggtttttttgaaacagggtctccctctattgcccaggctagagtgcagtggctcaatcacagctcactgcagccttgacttcccaggctcaagtgatccttccaactcagcaggaccacaggtgcatgccaccgtgtctggctaacttttttttttaatcattttttgtagagacaggttctcactgtgttacccaggctggtcttgaactcctggccttaagccatccacccgcctcggtctcccaaagtgctgggattactggcatgagccaccacgcctggcccaataagtgctttataaatgttaattatggttgtgcctcagcatctttgtggaataatggcaatatgacgatagaagaaagcccaggctaattactaggctgatctgtttaattagctagaggtttgactaccactttagaatagatcaccaaaactgcgagctgtgtaataaaagccaaatactcttctatttaatatcagcctgtggaaagaaaagccaaatgatcaaaatcactccccagacatttatttaaaataaaatgctttcatttgagcacttgaagagaggggaaagttttaatgttaagtctaacataacatctccaaataccacattagaaaatatgagtaaccctactgcgctatctgtttcccctactgggttccgctgtgctcttcctcccagggtttcaagtaagctggatatttagttaatactttcattttaaagtgctttttttctcttcttgctacacatagaaaacacacacacacacacacacacacacagacacacactttaacctgatgtaaataatattcaaaacagaccttactaataacaagaaaataagtttgactattccttgagctaaagcatcagttaaacaataagttggaggtgcaaaactgtcatgtttcagaggatctctaggtccgtcgcaatttaccagcacattcctcagtgtactaagaacagtaccaatgatgatgatgatggtggtgtttgtaaaacactacactggtcaacacatttttgcttcgtaatctacttaatttaattactaagacaaggttgtaagaaggaaagcatagaaaagggtttaagggaccaggcgcggtggctcacgcctgtaatcccagcactttgggagggcgggtggatcacctgaggtcaggagttcgggaccagcctgactaacatattgaaaacccatctctcctaaatacaaaaaaattagccaagtgtggtggcaggtgcctataatcccagctacttgggaggctgaggcaggagaactgcttgaacccaggaggcggaggttgtattgagccaagattgtaccattgcactccagcctaagcgatagagtgagactcaaaaaaaaaaaaagaaagaaagaaaaagaaagaaaagggtttaaggtaaaacctagcattgagtaataaaaaaggaagacttaagaaaccaaactttcttttcttttaaacattgtttagaatgcaaattccttaaaggcctagctgaattaccaaccccccgcccccaccaagaaccattagctaggattaatctcttcatcctgcattattttaggtttattctatacttcattctaaaacaaagcagactataagatagtttctgtgtctgtcccctaccatattataaagactgctttgtacacggtaggtcaacaactaagctgctgagttaaaggagaaaccaaaacaaaacaaacttcaaatgccttaaatatcaatgacgtacagtaagtaccagggagtagctgatttaaaaaaaaaaaaaatcagcgacataaaccaaatatctaataagctccctttgttgttactttcttttaagaattcctaaatatatcataaaatagtgattatttatacaacttggggctgctcaaggatgatttttttaaaaggacagtattttgtggaatttttcacaaaagcaaatatcattaaactatgtcttagattttattatttacaaaatactaccatttgtaagttaaaacacactcaacttctattaagtagcgactgatcattctctgtaatataagattttaacacaaatctatggacttttcaaaaactttaaatgggtcttcagatcatatttaaattttcaatacaacaccaccctctaggggtgaactttaaattacaaagaccattttgaaaaagcaaactgcagaattcgtgctattcttgcctgatgtgcattatatttcaaatacaaaaataaaccttattttatttaatattaaaattcatagaaaatatcttttaacaaatagtttaattcttactaaactctgcaaaagttaaaacaaaatacaaaatcaattaaattgatgccaagtgattaaataggaaatgtgctttcacataaatttaaccttaataatcctaaaaagtgcagactgggaatggtgttttttgtttttttgtttttttgacatggagtctaactctgttgcccaggctggagtgcagtggcgcgatgtctgctcactggcaacttctgccccccgggttcaagcgattctcctgcctcagcctccaaagtagctgggataacaggcacgtgccaccacgcccgggtaatttttgtatttttattagagatggggtttcaccatgttggacaggttggtctcgaactcctgacctcaagtgatccgcccatctcagcctcccaaagtactgggactacaggctaaggaatggtgttttaaataaatcagaataaatcagtgcgagggaagggaatttaattagattagcatccccaagaaaagagaaatctcttgcaaaacactttaacttgttagttttacaactactgtcttacatgtttgacaatacaaatattttcttgcatgtttacatacatgattattttagtgattttcgctactacaaccaatttaggttcagtaagtcccattcaaagaacattcacaattaaaacgctattctgatattcactttgtaccaagtcataattactcatagatgtattcctgcaagattgactagaactgacttccatggtaaaaatagaagaactggagaaaatgtcccaaatattcaacaactgaagggctaagttcgctgctagccccaatgtgtgacccaacttcatttcacaggtcagtctgcctgcacagtgcttcattcattatgcagcacgctaagcacctccacagtcatccttccaaccagttagggtgccgtccaggaaagagaaatcatggctgttatttatatagggagaattttaatgtatcccacctccacctattccttcttccagtaactacccccatagggtaacttactatcctaacctttaagaacgtagatcagttgtataacactttatagaaagagaatcgtatgatgctagctactcttgtggctggattccttcactccacatattttatgagtggtagcattatttttatgtgcagttgcatagcattcatttgcattgctgtctagtactccattactccaatatatcgcagatccttcattctaccactgatgggcatttaggtagtttctacctgggggttattataaatagtgctgctatgaatattctagtgtgtgtctcttatcagcctcggaatgcatttctgtcgcacatgtactcagaagcagatacgcagaaagtgtatgttcagcttaagtaaatattgccaaatagttttccacagcagttgtacccgtttatactcctaccagcagggtatgagatttcaagttgctccccatccttgccaacagttttccaactctttcattcctgttattctggtaggtctggagcagccacactacgactttacttcgcacttctctgatggacagtaagaactctgtgacacttgtagcaggcagagggatagaattcacccgagacaacacagagggaagggccccggccagaggctctcaaccaaggagattctgccctcctcaggagacatctggcaatgtctggttatttcaaatttgggggtgttgttaacatctagtggttaggagccagggatgctgccaaacatcctacaatgcataggacaccccccaccaccaccaccacaacaaagcattatttggcaaaagtgacaataatgccacaaatcaagaaacccaaatcaagcaaatcattattgggcattttctccttagccaaatcatcattctctgatacagcacaagaggtcaatgtcctattgtcttaaaatgttatttttcctagagttgaggggatagaaagacaacaaaggatactaagtgccacactccatggcacagtgcatatcttctgcatatcctgtttctttctcagttctcgcgacaatgcggagatgaggaaacagataccaagcaggctccttggctcctctaaactcacgcaaagagcagcagagctgggaccagaagctgtgattttccactgcacccagggtcttacttttaactaaaaataaggggagtttttagagtccacaattcctgttaacttgcaaggcatgaattttaccttattagctttgcaaaaggcaggcaaataaaacgaggtatgagaaaaagatcatttgcaatgttaagattattaacctgcacctgtaagtatcttaaaatatttcaacaaatccaccttcctcatcacacggtgatctctttgaaatgaaacccataccatatttttctttgtctatgcccaatacctgtaagagcaggcattcaacagttaacatgtcctggattaattactggcctgaaaccccagtgagagaagacagaatctttataaaacaagcaggtggtttagattttatttcatcaccaacacaactatatttagtaacattaactagaataaacggtttttgttgaaaaatattcaattaagtcaaataatggccaataccacaaaattctttttgaaatgcaaacaattcaatttttccaaggatgagtttgccagcattaccttatcctcctgtggatcttctatttgaggcttctatttgtgaggccattggcattattagggccaacagaaatccacccactattagagcagttttgaaccgtggccatacattacaatcacccaggaggttttgaaagccatgggtgtccaggaggataatttggtaaatctgcagtagatgaattttgaatttacacccaggaaataactacacttagcagtatcgtttgaaaatagctacccacgtaatttttgcaagctcccctccccttaggggtcaggaccactaccctggagattctgaactgaactgaggagggcacctggctgcttttcatacccaccagagttcaacatcccaatgagttagttgctcgtgggcaggactagggggcgacgtgagcccacctaacaaacagcctggcttccttcccacagggatggcaccacctggtcatttgtatttaaacaattcccatctgctttacacagaaggggcaaaccaaacccaccacccccattctcagcctatcttcttaaattatcaacacccagtagctggaataggacttgaaatggataaacctaccaacacttgactgcagtgagcccagaaatggacaaggcaggatttcctgtttaccccacatagggtggggagtgcggggactaaggggtcctaagaagagacagcatttgccggaggaaacagtggggtttccagtttgtgtctggttccggctggtggcggggggtttctagtgactcgtctcactgcataggagcctgccctcagaggacgcaggcaggtgtcatttcaggcctgtgtactcctctgatgaacggccatctccctcccattcacatccgtgctgttttgccttatcattgtttccccagcacctaacacaaagcctgacactggtgggtgaccactaaacatttcttgaaagaacaaatgggaagggagagctccagaatctaagctgggaacagaggaaagcgagaagcctaaaagaaggagcgaactgaagaatgaaggaagtcaggagggagcgcaggtgcacagctttgtgatgctctgcgtggttacaataaagagatgatcaaagtatgatttcctgaagcacatggtctattgccatacaaaggctcatgatccctaaggaggggagaataatgagaacaggcctaccagggagcacacacgacagacgaggtccattcaccacacagggagtgcttcccaaatattaaagtccagttgctcacttaggatggaagcaggcctctgtggaaagtgacatctgattaagtttgaggtgtgccttttatatgagtggttctctccagagatggtgtccaacacagggagggatccacggtgacatataaggcccccggaggctagaggagttcccaggggtgctggtgttggcagggcctttaggctggaaggctaacaggctaggagcacctgagctggggatctttgcagaaggggctggcagagctcagcctgctgtggctaagccctcaacgtatctgtcaaactctagagctgagatgtccactggggtgcagtagctgaggtcagtaactcctatagggtctgacagtgtgtggtgtcgcattctcgaggggagggagagcacaccccaagttctcaccacagcaaagcaggccactcgcatagcaagccaggtaagcactgggagtcacttcaaagctccataccatgtgagaaccagggatggctttgagaaagaactaggtttctagccaggctctgaggactagccacaatccaggctctcagagaagcaagatgactgtgaccccagcaacaacgaagcacggccctggtcaggcattcagatgccaggaaagagaagagggggtctggaaaggaaggactgacccgaggaggagaggactgtcctaagagcgtctgcagggaggctgggagtaggcagcaaggaggtaaggaaggccagcctggagctgagagcagtgacgggcctcccaagctgagccctctgtactcttcacactgctttctagcaaaaagagcactggatacagagtcagaaaaatccagttcccaggccataacctttgctagccatgcaatcttcatcaagtgattccacctctctaagcttggatgtccatctcggcagcctctgtgttgtctgcccgagccctaaaatccaaggactccgatcattcctcttttccctctccactcttccccacccaaccacaggccgccattcactgcaatctcaagacagaatgtcatgttttatagaatacacgacggtaactggtatttctaggagggttggctcctgggtttatgctgtttttcttacaaatgtggcaagcaaatgagagcttcacctcccaagacaaaaaaataaaaaagagacattttaatcttaacaatgggcatgaagaatactgtttggctcattttcctgctggtatgaattaacaataacaattacagggaacaatggtgagaggatcttaactaacccaaagttctctgtgtctctggagagaacactgaggcaaaacagctgctaactaggaggaatctggctttctcttccgtaaaatgaagagatctaaaactcctggctgtcactagttctaggtgagtctggctactagagggttaaggagactaaccctttcacccataaaagtttcaggtgtaatcctattactttggaatggctagcagtgttctacgaaactattcaaggattaaggttagagaatgcctgtgccctatggtacaggctgccataaagaaaattatgatcctagatgcagtgatgccaatttacatggtatctacataaatgattcttccagctccctcttctccattttctcagtaaaacaagttttttgttagtttttcttcttgagacagggtcttgctctgttgcccaggctgtagtgcagtggtatgaacccagctcactgcagcctcaacctccgggactttaaaaaaggcgatcctccaacctctcagtctccggagcagctgatactacaaatgtgcaccaccacacctggctaatttttgtatttttttgtagagattgtgtctggccacgttgcccaggctggactggaactcctgggctcaagcgacccacctgccttggcctcccaaagtgctgggattacagacgtgagccaccatgcccggctaaaacaagtttttaagagggagagaaatgagcaaatacagcattgcacctgcacgttcaggactgtctactccccaaagcaataatcaaactaccatattttatttatagctgctctcaaggcacaactgcttccaaagtacaagctagaacatttctagtttggtctggaaccacaaaggaaaggtacaccaacatgctgtaccttggaaagctgacctgtaaaacggaagccttcttcgtaatatttaaccaaacacagggcctgacaccttccagtcctcttctgacagatcactgcaatatgtttgctgttttaatatcatgattaattaaagagccagctgacaattttacaaactaggaaggacacagaggaaacagaatacgcgaactattcctggatctttccttttatccagccggcatgtggcacgctattcttcatgagtgagaaaatccatgccctaaattctcactcataaatgcatatttagttaatattgaacaaaaagaaaatagtccaaataatttgtcagatatgcacttataaaacgcactgagtcaatgaatgcaaaaatattttgaagagccaaaaagtgctatcagctgctaatagaagacactagacaaagtacagcatctagaattgtttttattgagagaagaattttgctgagcccagaagcagaaacatccaacataggtacctaacaccacacacatacagcacctccaggcgtcaggcacaactatcctgcccagagtcatgatacaggtgaacacctagaagttaaacccaatatatatacaatttccatgcctctaagaattatttacttgtgtctgggaccctagacatacagcaagcaaggcattcaaacaacatgaatagagtgccacgttaacgaagatctcactccactggcccagaagggattgggatccaaagatgagtaagacacagtccctgtccttgaagagtatatcacagagggcagaacataagacctacaaacaaacaatagaaggcagagggaggacaaatcctattttctttttttttttctgttttcttttctttttctttttcttttttttttttttttttttttgagacagagttttgctcttattgcccaggctggagtgcaatggtgtgatctcggctcaccgcaacctccacctcccgggttcaagcaattctcctgcctcagcctcccgagtagctgggattagaggcatgcaccaccacgcccagctaattttgtatttttcagtagagacggggtttctccatgttggtcaggctggttcttgaactcctgaccttgggtgatcccccccggctcggcctcccaaagtgctggaactacaggcgtgagccaccacgcccagcttcaaatcctattttgaagggacttggggatttcataaaaaaagtggcattggcatgggcccttaaaagaacaagatctcaaagcaggtttgaggaatgcggcattctaaacacagtacttcagtagacacaaacaaagtatttgctataacccattgattattgcatgagcagattaagtgaattttaactgattactaagaacaagagttccgtaaactgtaaaactatttaaaatttcccatcttggccgggcgcggtggctcacgcctataatcccagcactttgggaggccgagactagtggatcatgaggtcaggagattgagacatcctggctaacacggtgaaaccctgtctctactaaaaaatataaagaattagccgggcgtggtggtgggcacctgtagtcccagctactcaggaggctgaggcaggagaatggtgtgaacccgggaggcggagcttgcagtgagtggagatcgcgccactgcactccagcctgggcgacagagcgagactccatctcaaaaaaaaaaaaaaaatttcccatcctgccagccagcagttagctagaagcaggttctgatcttggttcggccacagactggctgcgtgagtttaggcgtgttacagaatctctctgatctacttctgcatctttgaaaaatttggataatgatacagcctgaccattctcctttgatcataccacttttctcatggcatttaatatggcctactataattacacatggctttatctcccctgtagaccaaaccaagagctcctgagggcaaaggcctttgcttatttactctgaaacgcagcccagtgctagctgtgctagcagacacattgtcaatgccagcttctaccctttctgttggattcccacttgctatgaaaatcctttcctttgttctacaaagtacactgttcttcaaatcatgaagtaacccagtttcaaaattttagttttactttgtaagtttcagcatatctctatcccagtatggtggggtttcttgttgttgttgtttttgttttgttttgtttttaatattgtaaatgttataggtttcaaagattatctatttgggaacttgggcataaactcaacatatatacttctcatgcttccaagtactggaagcatgtggaatctgagtggaaaaatcatttaaatttagctttaaaaattaaaaaattaaataacgttgggatccaaaggaaagactcttaaactttatgttaactgaactttcatttcggccttgtttccaatagattgagaaaaagattgaataccaaacagcaacaaaagcagcccatgatgcatttcagtgtcatcagggtggctgtggggctgaattgtaggattatgatagccaaaattctttacaaaactgaacactaccctgctagttgatcgattcaaacacaaagtgtgagcagcagtcaaaattccttctgtcctagagagaagaaatgccctcaggatggagggctggaaagaaagctctctgaggcggctgactgcaatgaaggttgccagtgccccccgactccaccccagctcctcccagtcacaaccactcagcaggctggtaacgcagaaagaacgatccacattgaaaactgagtcatcatgagaaaggctccatcacagacaatgcaaataaggtacaggacaaaggaaggaaaggaatattgccaagaaaaggtcaatgaagacacaccagacagccagagagattatgctggaaagaattggaaagttatgaaccaacatttttccttttatttatttatttatttatttatttatctatttatttatttatttatttttgagaggaagtcttattctattgcccaggctggagtgcagtggcatgatcctggctcactgcaacctttgcctcctgggttcaagcgattctcctgcctcagcctcctggagtagctgggactacaggtgtccaccaccacgcccagctaatttttgtgtttttagtagagatggggttttgccgtgttggccatgctggtctccaatccctgacctcaggtgatctgcccgcctcggcttcccaaagtgctgagattacaggtgtgagccactgcgcccagcctgaaccaatatttctctatgagactttaaaaaataggcatagcctccctgaaacaggaactcaaataagaaacaggacaacaaggggagattaaaagatagcaaagttcagggaagaaatgaagttcaagaagagtgaggcaatcccggaaacggatgccgcactaaacagcaataaaggaagtggagacactgatggaaacacaaccaaatatatggaggacacattccagaaaatcccagtgattggctcaagaaggagcacatgactcacagacattagctgcagactttctggaacaaagcccaagaaagctatcagaagaaacattctccctggctaacattatgtcgccagctgctaccacggtggaagtcagcccaaagacagggccacataacaagaaaaccccaagagaaatgaaggcagaacctgagaacaccatgatcctctgagtcaaactgcacccgaagcccaccagaccttcagacttttcagctatgtgaatcactaaattccttttattttaaaaaattcattagaataagttttccattactggcaattgaaagcttcttgatacacttaagaacagctgaaatgaaaaaagcaaaatgttcgtaattctaaaacaatacattgggaaggcaaacaactgaaaaattattcaaaacaggagaatgtagtaaggtggcttattataaaatggatttatcaaaatccaatatgaaaacaacattttatgtgcagtaggcacaatccaatggccaactcaaaatatactcccaattcccttctcccactgcctccactagagggactgagaaagctgaatgctctctattccacaatttctcctaactaggagtgccatgtaatacggatctggccaatgagacaggaacagaagtctgctttgagcttctgggaaagtttttgcttttcttaattaaaaaaggccagatatggctcatgatatctcattttctctctccttgtcttactgcctggaatgcaaatgtgatgcctggagataaggcagccattttgtgactgtgacatgaaaagcaggagaaggctacaaaataaacaacagtgattacctcagaaaaactaggaacttgagatgggagggactttcttcacaaaccgagttttctttttttaaaaaacacattttataacataaactaggaaataaaattattttggaaatataaaggaaagattattagggtttgcttgcagtagttaggaggtttctgagaggggaagagtaaaagttgggaaagcgaggcagcagagtaaaaggtgatcaagctatgaaaacaacatgagccaggagtttactgaagcagagtttttcaaagtagaaagcagtagaatatacgagtgaaaagataaagggggctggaggatgaggataagccagacagaaatcagacctgactctacagtgatggacactcctgaatagtccctagaggttcctttttagcagggccggggaagtggtacaataaaaacaaagtttgaagtccaggatacagaataagttggcgtttaaagctaaagaaaacagaagtgaaaatcagaacaaattcatccaattcagttctcaagatttcaagattaaaactgcaacatttaactgtaagaatcctaggcaaggcgcggtggctcacgcctgcgataccagcacttagggaggccgaggcaggcaaatcacctgaggtcaggagtttgaaccagcctggccaacatggcaaaaccttgtctctactaaaaatacaaaaattagccaggcgtggtggtgggcacctgtaatcccagctacttgggaggctgaggcgggagaatagcttgaacctggaacacagtggttgcagtaagccgagatcatgccactgcactccagcctgggtgacagagcaaggctccacctcaaaataaaaaagtaaaataaaataaagaaagaattttattgctgtacacactgaagggtttggacggttctgttattacatactttctttacatatccttgtttctgaagtaagcaaaacaatggaatttaatttctctatgctgtaagaaaacacatttgtcatttctttttacatttcattaaaagtaatggcaaaaaacacaattactgttgcaccaacctaatacaatgtaatgtaaaaagaaatgtaggctgggcgcagtggctcacagctgtaaccccagcattttgggagtccaaggcgggaggatcacctgaggtaaggagttccagaccagcctggccaaatctctactaaaaacacaaaaattagccgggcatgctggtgcacacctataattccagctacttgggaggctgaggcaggagaatagcttgaacccgggaggcggaggttgcagtgagcccagatcgcaccactgcactccagcctgggcgacagatcaagagtccgtctcaaaaagagaaaaataaaaaagaaatgcagctgcaaatagaacagaagctggacacagactggtccctggaaggaaggcaaccagagtccagtgcactacttttggatagggaggtaatcaagagagcactctatggggagtccaaagacctggactctggtttcaagtctacctctagctcccatgtggccctgggcaatcacctctgctttctgaagctcagcatgctcgtctgtaaaataagggaattggaccaaaaattcgctacagtccttttcaattctaaattctgtgaatagtttacttcagccttggagctggcagggacggtggctgagagaagaatctggggaccagggctggagaatcagggctgaataacgtgggactgtgcagtaaggggtcacccatgaaacctggagtgtgtatccatctaataacaccatttacattcttgaatattccggaagtcctacacttaggaagaggtactaccaaattccctatttgccctgaatatggggacacataagagctatagtaactataaaacatgttttatagatcttttttaaaattgtgtaattagtgccttaatatgtatgacaaagagtaaaaattcatccagcacgccatgatcttcagccaattcataccagtaactagtgatcaggcatcccaattttcttttctctatttttttttttgagataaggtctggctctatcacccaggctggagtgcagcagcaactactagagattgtcttaaatgtctctagttaatttctaaatcattttgattaattccaaaataaagttccaaatgctgttcaccaaaatgaaagcaatttgaatatttttcttttttttttttttttttttttttttttttgagacggagtctcgctctgtcacccaggctgcagtgcagtggcgccatctcggctcactgcaagctccgcctcctgggttcacgccattctcctgcctcagcctcccgagtagctgggactacaggcgcctgccaccacgcctggctaattttttgtatttttagtagagacggggtttcaccgtgttagccaggatggtctcgatctcctgacctcgtgatccgccagcctcggcctcccaaagtgctgggattacaggcctgagccaccgcgcccggccaaacatcttaatccactctaaaaagtcccccatattgaaatcccaacatgccttcatacacctgcagcttcaccaaagcaacttcacactgtgctgccagccacagcctgaggctgagtgactccggagtggcagaaagagcctgctgagcagctgtgggggaagagggcatccagcattgctccctgcaaaggaagccaagtcctgaccatgcctgaaggcgcctgacaaagtctccacagaacaccacggccaggagaggctgtgacagcactcattcattcagcatatatttactgatcacctcccaggtgccaggcactgtgctaggcactggagattccacagtcaacaaaatgagacaaaactccctcttttcgtgagctgcacattctagtgtatgtgaaagacaaatgagagaaatcaaaataaagcaggaaagtgcaagcaaggcacaggtaggggcaagagacaaggaaggctgctctgagaaggtgcctctgagtgacgacaggaagggaggacacaatccccgaggattagaaagttcattctgggccgggcgcggtggctcacgcctgtaatcccaacactttgggaggccgaggcgggcggatcacgaggtcaggagatcgagaccatcctggctaacacagtgaaaccccgtctctactaaaaatacaaaaaaaattagccaggcatggtagtgggcgcctgtagtcccagctacttgggaggctgaggcaggagagtggcgtgaacccgggaggcggagcttgcagtgagccgagatgtgccgctgcactccagcctgggtgagagcgagactgcgcctcaaaaaaaaaaaaaaaaagaaagttcattctgtgctgcgggaaagcacatgcaaaggccccgaggcaggaggaggccagcgtgacttacaggtcatggaagagccacagttcttatctctgcatgagatgggaagctcctggagggcttccgaacagagcatggccagaatctgagttcccattttaaaggcccactccagcaccagcgtggagaacagagagaaaggagatggagttagaaacgggaaagcagctatctgtggactagggtgctagtcacagtgatggcaaaaagtgatcagatgtgagatatatctgaaggcagaacaaacagaatttgctagcagacagtttgagatgtgagagaaacagaatcgaggatgactgtaaactttctgggctccataaaagacaaatgcatatctggacataattactactcacactggacacaggcttggaaatccagagccaaagacattctgtaaacaccaaaagggcatctctaaggacctgaaaacctacaggcttctaaggctccttaaaactccaaccttacaaagaaattcactgtaataagtagttacttacaaaacatgaatgctacaaccctcctctgtgctcccctccactccggtgtgcatgcgctctcctatctgcggcgcctgctctcaggttccccctctccagcctccttcctgactccgcttcctcattccacacaccttgatgcagatcttctccaaagatctagcctcatttgccctttcttctatctctacagtctttcactcagcaatctcaatcacttccagcaaccatctcttcaaagaaaaagaccccataaatttctatctctggcctctttgcaccacaggttgagaattcaaattacatccttgatgctagtagtgcagatgcctgccgcatctcaaactcacaaagccctacactgagactccaatcttcccatctctttggctaaagccaggggcttatgactgagtgacaggttacagagcttgggcttcattccataggttaacatggtgcaaaatacgattgctgagctttgcaatgatctgtccttatctttccttctgaacgttcatacatgttatctgtttaacctctttagcatgtcaccttctacctttatattacgtacctttatattaggtaaattgtgacatatactatttacatattgacatatagtatatgctatgatcatttatcatataccatttatctgcatgttttatcttacctattaggctatatcaccatttaggacctattggatttacctttacataacttctgtgtactaccagtgtacaggtgctgcccatagaaaggcctcaataaacatttgtttgatacaaaacacatgtgtagaagaccatggaaagcgaccaaacatcaaagccatctcattacaaatttcttcaaaaggtgcttcctttaaaactcccccagtatcattatcccttgggttacattttctttgttctacaattaacaaacgttccttacaaatagagaacctttctgactcatttcatgagggtctcaaatttctatcttcttctttttttttttttttttttttttttttttgagatggtgtctcactctgctgcccaggctagagtgaagtggcgtgatctcagctcactgtaacctccgcctcccgggttcaagcatttctcctgcctcagcctcccaagtaggtgggattacaggcacacaccaccacgcctggctaatttttgtatttttttgtagagaccgggtttcaccatgttgcccaggctggtcttgaactcctagcctcaagtgatctgcctgccttggcctcccaaagtgctgggattacagatgtgagccacaaatccagcctcaaattcctatcttcaagccacaggaaacaactcatttcttcaagatataaataaataaataaataaagagcaaacaaaccccaagactagtattttggagggagacagaatttcaaatgtcaaaacaactttgctctcatcttctgagatgccctttagggtaaccattttttctaaatgcatcatgcttactattgcttgtggaaatttgcttattcaaatgatccaatcccttctccttgctactaaaagtgcagccacctaccagcagcatcagtggcagctgggagcttgtcacaaatgcaaactaacgagccctatcccagacatactgagtcagactctttggggcccaggaatcttaatttaacaagatctctgggtaaacgtttgagaaggacaggcctatcccatggccagagttacctttcgaaaacccatctcaacgtgtcatcagaaaccttcaatggccacagtataaagtccaagcctctgcagaaagtgaaggatcttatcatttaattgccacaatcttcccattaagtcaatcagcatgtgttgaccacctgctcacacgccaggctctcttgcacgtttggagaagatagcagtgaacttggctgacagccctgctctcatggaacttaccttctcagagggaaactgacctcagaactcatctcccaactaaccatcccattacctgtgttctactcacactgctgtcttcacccttctccaagtacatccacacattttacatttcatgccagggttcgtgctgtttcaaactcaataccaaccaggctgaaatcatcctccttactctgggcttctgctcgtcctctaacacagcaaaggctgcatccctagactgtgattcatatttaaatgtctttttctcctctgctgggcagtgtgagcctcaggggcagaaccatagatccttcatccttgtatacgtggcacctagccacatggcttagaataaatagcatttaattaaatattcttaaaaatacaactcagggatagaattttggcagtgttcaaaatgcttcctttggaaatctttaaattttcctctaaagccggtgtggtggtgagagcctgtactcccagctcaggagaaagccaggaggatccttgagcccaggagttcaaggttgtgatgagctgtgacgccactgcactccagcctgtgcgacagagtaagaccccgcctctaaaaaaagaagaaagttttcctctaaagtctaagaccttcttttttaatgatattcatttaaatagtggaaaatatcctttgacagtataattacaattttggcaatggtctaataaatggtgtaagagggtgatgaagatgggcaatgcaactgctattctaaaacgaactttaaatattaatagaactcattattttggtacattttatgactgaaggcaactccaaaaatgtcttgcacagtgacagcctcactgtaatatttttattctagagtaaggaattagaataacttttttttttttcattttatagacacagggtatcgctctatagcccaggctggagaacaatggtgtgatcacagctcattatagcctcgacctcctggtcccaagaaatcctcccatctcagcctcctgaatagctgggactacagggcacacaccaccatgtactgctaattttttaattttttgtagagatagggcaagattcctggcctcgagtgatcttcttgccttggcctcccaaagtgctaagattacaggcttgagccaccacacccagctagaatatcactcttttcaatgtttcaattctgccatgctttggtaaaactaaacagaatccctcttccagcaggtaaatcttctgttaagacaatcattcatgttttcaagaatgcattatgtatgggaggagggtgcggggaacatgtctgtttctaaaacaaaaaaaaaaaaagcaagaatattcagatgcggatgggctaccgtaagtcttccctatcatcctccctttttctacgcccctcccacaacttggcacttgaggcacctccagtgttccctggaagacattcaaaagcaaaataaataatggaaagaaaactgaagtctacgttggaaaacctttgtcctaatcccaaacgttatgacctcaggaaagtacttctactgtctgcacctcagtttcttaaaaggaaagctgaggttccttccagtttaaaatgctagcactttcgaatgttttcgtctctagagatgagagaacatgccaattcacctgcgtcccaacagcccttttgggaggtatgcacgcagctctacttaagatttgattgaatgaagtcacacaccattaaacattttcaacattcctatcctaaatatgccttcatttttgcattacatataagtaatataaccaatagctatagtaaacattactgaggctttcttttttttaagacaaaaataagtaaatgtctatactgacttcccatactgtctttggaacccactgattgagagaccagtatcctgcctggatattaatgggcacctgccacataaaagagagagtggtgggccaggcacagtgactcacgcctgcaatcccagcactttgggaggctgaggctggcggatcacctgaggtcaggagtttgagaccagcctggccaacatgatgaaaccccacctctactaaaaatacaaaattagcaaggtgtggtggcgcatgcctgtaattgcagctactcgggaggctgaggcagaagaattgcttgaacccaggaggcagaggttgcagtgagctgagatcgtgccattgcactccagcctggacgacagagattccgtctcaaaaataaattttaaaaaggagagggtggtgcattaaggagagtcgacagcagctgcccccgtccttaagaccacagtcaggactcaagcacaaaaagtgttttcatgaagtaatgaggctttagataaacataccacacttttctttgcaatactattttgcaaattaattaatttcaattaagaaatgtcaattaagaaaatgtgaaaatcaaaagaacatttttaccatggtgcagacctggatgtctccaacttttgagtgcacaggactcagggattttgtcaaaatgcgtattctcagtcatcagttccgcagcgaggactacgattctgcatttctaacaagttcccaggtgacgctgtgggccacatgtaagtaacaaagaggtagaaaacacagttgtccctcagtattcgccggggattggtcccaggacccccaggtgtacaaaaatccatgcatactcaagtttcgcagtctgccctgcagagcccacctgtatgaaaagtcaagggttccacatcccacaaatactctattcttgatctgctttgaaaaacattcccatatggggtggtggaccctcacagatcaaacatgttgctcaagggtcaactgtatatgccaggcagcaatatgcttcctaaagggactcattctgaagatatgtgatctaaaaattcactttttttttttaaataacttcaactgggaaaattccacgaagccagaccctgggctcaaagcccaggatcccagccacacatctcttaaaaataggttttcaaaatgccttgcattttttaaaaaagaatagcatatttgcctaaaattctagccaaaatgcttgatattcaccactctattattattttttgactaacttcttccttgttcagttctcacttcctcctcgcctgtcactaagctgagtcacaaagctgtcaacgctctgctgcttgccaggtagatgcaactcctttctccatttgtttatctcctgcaaagcggaataatttttctaaattcactcagattcccagtggcacacagtatcatgcagaacagttgtggaattaggaaaccaacaagaaattttgtacttcctgaaattttgtggttacttcaaatcatcatcctgtaaagataacaaggatgagtccctttgcaaagcaaaaatgctagttaactacaaaactggaatttaagtacggaaggtcaatttcaaatgaattcacaatgcaaaaatctttcagacacctgagaagtaacttgactattgaacactgtactcgtagagttaaaatagctcaagaagaacgcatatgcttctatttagtgtttttttttaatcctgttgcaaattctactattctagtattttcttatgtttaaaaatatcttaattctcatttactatccctggagcaatatccctggcaaattcttcataattccccatgagtcttccagcacagatgcagctttccaagtcaaaatttgtacaaacatcatctgtcaaacttctgcaaggtaatgacatactcatcctgagctgtcacctccccttgcagagactttgctaaaattcttagcatagcaaggactttcaaacagctttctccagcccattcactgtacaggtgaggacacggagaaccggtaacttgctttacttctacaaaaatgctacaatgcaaatttataatgctacggaaaagattatcctggcttcttcacttatgcattttctaataatctacagaaggcagagacagccaatgatgagaaataaaagctctctatttataaacacgtacctaagaagctactaataaaaaattctataaaaggaaaacgagaacactgaactctctatcatatttgaaaaagaaagggcagacatcgcacaattcaaacccagcttccagacttcagggagctctagaaacctgaccagcccacaacaaaagacccagccaccggactgggggttccacaaacagtcagccctcagagatcacccaacattggggctcagaatataagttttgcacatccccttttttgaattcaggaatgtcttccctgcccttaatcacaagcagacaaccagatatctgaggaaagctactaacgtggaagatagagaccaagttaaaccagaaaagcaaatcagaggacacagagactatacaagaagaaaattaaaatatatatatataccaagtacctcagaattacagtatccataaaacagggtgtgattttttaaatagttctagaaaacaaaaaacacaatagcagaagttttgaaaatactgacagaaggattagaaaataaagttgagaaaaatcttccaaaaagcagaacgagtccggaagggagaaagggggaaagggggggaagtagactagtccgggaggtccaaaaactgaaaagtacaattgccagaagaagaaaagaaaggaagctgagatatgaaaatatatcagtggaatctaagaaatatcccccaggaatgagtttctagattgaaggggtttactgagtgcccaatataatagttgctttttcttctaaacccccaagtcatggcatttgaaatttcagaacactagggacaaacagaagatcccaacagtttccagagagaaaaaactggtcacacaccagcagatacaaaatcagaatggccagatgtggtggctcacgcatgtaatcctagcactttgggaggccaaggtgggtggatcacttgaggtcaggggttcgaaaccagcctgggcaacatggtgaaatcctgtctctactaaaaatacaaaattagctgggcgtggtagcggcgcctataatcccagcaactcaggaggctgaggcaggagaatcacttgaacccaggaggtggaggttgcagtgagctgagatcgcgccactgcactccagcctgggtgacagagcgagactttgtctcaaaaaaaaaaaaaaaaaaaaaaaaaagaaatcagaatggtttcacatttcccattggtaacacaaagccagaaggcaatggagctcgcctccaaaaccctgaagaaaaatctacaactgggaatgctacactcaatctatcaatccaatgagaatggagaataaagatgttttctgcaatatctcaaaatttatctcccacacactctttgtcaggataagctcttccagcatggaagagtgaccccggaaagaggaccacatgagacacagcacatgggagaaaagtgaaggattccccagaacgaacgcgaagagggatcccagcatggcacttgtgtgtcccagacacggaactgcggctagagagccaagacacaatccccgagagttactctgtgcagtcactgtgctaagcagtgcacagacagcatctcatttaaattctacaataagcctggagatcagcaattattagctgctattatgggaattttaaagatggggaaagagtcagctaggttaatctccccactgtcacacagctttacatggcagagatgaaaattcaaacccaggcctgccacccttttacacctacacacgtgtccactgcaggattctgtgagataaaacagaaacctggaaatgtgaaggaaagaaaggaaacacggattaaaaaggcaaagaggacagacacaagaaacgggacacccaggaagagatgagcgatgggtgttatgctgttctgtatttatttcctattttaatgatttttccaaattgaaaaaggaaggggagaaatataagtgaacaggaggagaagaaagtaataagggggggaaatggaaagacataggaaaaagacatgagactaaggaatacaactggaatgacactctttggcattcagaaagtgtagtcttaaatagcatattctccctcgatgatgtgaagtgatacatctcattcattactaaatgttcaaatccaagggattcccaaattccttccaaccatcttttcggttttaaccaaaatgcaacataggctgggcgcagtggctcacgcccgtaatcccaacactctgggaggccgaggtgggtggatcacctgaggtcaggagttcgagaccagcctggccaacatggcgaaaacctgtctctactaaaaatacaaaaattagccagtcgtagtggcaggcgcctgtaatcccagctactcaggaggctgaggcatgagaatcacttgaacctggggagcagagggcgcagtgagccgagactatgccactcactgcactccagcctgggggacagagcaaggcactgtctcaaaaaataaaaaataaaaaaataaaaaaatgtaacataggccagaacaggcatgaactatgcgtgatgtgcttactacattcaggggttctagggcagtatggggcttgtctaactccatggactcctccacccataaaccaactcagatgtgtttgttcatatgcttttaaacaaataaaatgttttacacaaatgtaaaaccccacggagaaagaaaaaatataaaagtgtaatatataagttatccattccatagacctttacagaagctcaccttaacaatgctgttacttagatatggaaaactcatttgcctaacatctgcaaaactgctcagagataacaaacttaattctttttagatacctttcttaagagattaggcaataaacatcatttagttaataattttcaactaaagcaaatacattatataagttatacccaatagagttgaaatatccaattcagtaaaacaaactgttcagttaactagattaatggtagcctcattaacagatgttctgacttgatttgcgtgtttttcttacattttactctcatacaaaaatgtctgcttgccttacataaagatatacattgccttcaacagaacctaatttactttatcatgttttattctttactctcactttatcttagttacacaccatatgtgaccttcaaaaaccacagagagccaaggactatgagcagttcagaaatcccacggatttgtataattaaaaataatttttggccgggtgcagtggctcacgcctgtaatcccagcactttgggaggctgaggcgtgtggatcacgaggtcaggatatcgagaccatcctggctaacacggtgaaaccccgtctctactaaaaatacaaaaaattagccgggtgtggtggtgggtgcctgtagtcccagctactcgggaggctgaggcagaagaatggcgtgaacccaggaggcggagcttgcagtgagccgagattgcaccactgcattccagcattccagcctgggtgacagagcgagactctgtctcaaaaaaaaaaaaaaaataaaataataataataataataataataataattttacaacacctataggctattgatctgagttaataattaaagaaatataaaagaacatggtgctgaagtataatatttcatctactgaatcacaaatcttgaaaagaaaggccaatatccaatacaggtgaaattaatacaactgtaactattttgtggcatgataaatttattacaaaccatttagaacagtttgaatatatttggatataaatataaaaggtttgcatataaatataaaaaacatctaagaagtgttgttattttattcagcaatcttcctagaattaggaaaaaactgaaaagaaaaagaatattaaaaaatagtccctacaataattattataagcagcctacttaataaaaagggtaacggattaataagtaaattatattacatcaactccacatattatgctgccacagtagcactgtaaaatggtttaaagcatttgatcactttgtatttaatctattcattaaatttttttgatataaaaaaatttaaaaaataaaagtcatgcgtaattctaccattaagagataactacagctaaaactgttacactttttttactgtgcaacacatgcatttatggcagagttactatcatcctatatatgtagttttattgttaaatattttggttgttttcagtattttacaacactacaataaatatcactgtgcaaatctcagatgattttcttagcatacattcctaaaaggagaactattgagttaatggtatgagtagtgtgccaactggtactcccataagtgagtgagtgtgggtataatttgtaatattttttaaaagaacagactgcaattttttttttttttgacagggtctcacgctgtcgtccaggctggagagcaatggtgtgatcatggttcaccatagcctcaacctcccagacaagtgatcctcccacttcagcctcctgagtagatggaactacaggcaagtgccaccacacccagctaattttttttgtattttttgggaaaacatgaggtctcgctatgttgcccatggtggtctcaaactcctgggcccaagtgatccacccaccttggcctcccgaagtcctgagaccacagacatgagccaccgcacccagcccagattgcaaatttttagaagtgctatagcgcgtatgaacaaaaactagaatatacaagtaaccaagttttaaaatttcagttaggccaggcacagtggctcacacctgtaatcccagcactttgggaagctgaggtgggtggatcatggtaaaacctagtctctactaaaaaacaaaaaattagccaggcgtggtggcatgcacctgtagtcccagctacttgagaggttgaggcaggggaatcgcttgaacccgggaggcggaggttgcagtgagctgagatcgtgccactgtactccatccagcctggcgacagagcaagacttcgtctttcaaaaaaaaaaaaaaaaggaaaagaaaaaacatcagttaatgtgtagccatattgctttacagtctaaatgaataacttctgggctagcttcaacggacgccatcattctcagattttagccctcaagaatagaggctccctagtttgctttttgtttttgaggcaatagagtctcactctgtcgcccaggctagagtgcagtagcgccatctcagctcaatgcaacctcccacctcctgggttcaagtgattctggtgcctcagcctcccaagtagctgggactacaggcgtgcgccaccacatctggctaattttttgtatttttagtagagatgaggtttcactatgttggccaggctggtctcaaactcctgacctaaaatgatgcatccgcctcagcctcccaaagtgctgggattacaggcgtgagcctctgcacccagcccaaggctccctagtttgattcacaccacataaaatgcctctctgacccacagctaaattcttagtgtcatggtattttccctccagaacacagagtagtaattctgacttaatgacctttctgcaggaacgccactcgtggcagcaacattcctttcctttaaagtggcttttgcttagctgtgaccttagcatttcatcctaacccaggtgaggaatataaagtcattcattataatattctccctcaatcacttgagtccaggaggtcgaggctgcagtgagccatgatcgcaccacggcactacagcctgggcaacagagtgagacccttaatatacatacattctccctctttgtttatgttggaaattttttataataaaaaaaatttaagtacattaagttttaaaacaactcatagcaaaggaatgttcctaagaagtgccatctaattttgtaagtacagtcatgccctgcataatgacgtttcagtcaatgacagatggcatatgccacggtggttccataaggctataaagagctaaaaaattcctactgcctactgacatcatagccgtcataatgttgtgcaacgccttacgtgtttgaggtgatgctggtgtaaacacacctgcgctgccagtcatataaaagtttggcagatacaattacgtgcagtatataataataatgagaataaatgaccctgttattggtttatgtatttactgtactttttatcactcctttagggtacactccttctacttacatgtattttttaaagttaactgtaaaacaaccccaggcaggtccctcaggaggtgtccagaagaaggcattgttatcacaggaggtaacagcttcatgcagttactgcccctgaagaccttccagtgggacaaaatgtggaggtgcaagacagtgatattgagaatcctgacccttgtctaggataatgcgtgtgtttgtgcctgagtttttaacaaaaaagttttaaaagtaaaaattgaaaaaaaaaaatttagtagaaaaatgtttacagagctgggcgcggtagctcacgcctgtaattccagcactttgggaggccgaggcgggcggatcatgaggtcaggagatcgagacgagcctggccagcatggtgaaaccccgtctctactaaaaatacaaaacttagccaggcgtggtagcatgtgcctgtaatccctgctactcgggaggctgaggcaggagaactgcttgaacctgggaggcggagcttgcagtgagccgagattgcaccactgtacttcagcctgggcgacagagcaacactctggctcaaaaaaaagaagaaacatgtttatagaatgagaatataaagaaagaaagtatttttgttcagctgtacaatgtgtttggttttaagctaagtattattatgagtcaaaaagtttttttaaaaaaagtttatcaagttaaaggtacagtaacctaaggttagtaatttactgaagagagaaatatattttaaaaataaagttagtgtagccttcatgtacagtgtttgcagagtcgtaggacacacgactgtccttggccctcccattcactcaccactcactactcacccagtgcaacttccagtcatggtaagtgccctatacaggtatttcaatgcttatcttttattctgtatttttactgtaacttttctatgtttagatacacaaatactcatcactgtgttcaaactgcccacagtatcctgtgcagttgcgtgccacaggggtttgtagcccagatgcaacaggtgatcccacacagcctaggtgtgcagtgggctgagtgcagtgggctgtgagcctgggttcatcaagcacgctctgcgatgttcgcagatgacacaattgcctaaggacgcattctcaggagtatccctgctatgcaaagcctgactgtactccctgttataaccatgagctgttttccacagcagcatggtcatcactatccccagacaccaccaaatttacatctactcagagaaataattatattcaatttaaaattttaaataagtactacacaaagatactctggaaggtcaaaagccgcatcatccttggcctgaggaaatcaagatgatcacagggctgtgcgggagaccagtagtgccaaaacacaaggtccagtaacacactaagacgaatcccaggaagacagcgggaggacatcgcacaacgtctcagtgcacaccattcagccactcttttctcacccacacactgatgccaacttcctgagtaacattccgagtaaaacgtgcacgactcactccagacagtccacttagtgtccacccacactcacgtggcataatggaaaggacgcctgctaggaagtcagccaggcctggtttcccatcccatctctgccaccgacttgctgtgagaccacaggcaagctgcgagccctgcaaagcagagatgacgcttctcacctcagcacttagtatggcacctggtgtggcacaggcacgcgatgagtatctgttgagtgaatgggagggtggcggaatccccgccgtgaagctgcctacacgatttcaatgggagcctcccactcccccgcccccacgcctcccttcccttctctttctatgggtctctgccttccctccctcagaaacgtgctagtcccatggcgttcataattgttctttctaaatacattccaaatcatatttctttttttgtttgttttgttttgttttgagacggagtctcgctctgccgcccaggctggagtgcagtggcgcgatctccgctcactgcaagctccgcctcctgggttcacaccattctcctgcctcagcctcccgagtagctgggactacaggtgcccgccaccacgcccggctaattttttgtatttttagtagagacggggtttcaccatgttcggcaagatggtctcaaactcctgaccttgtgatccacctgccccagcctcccaaagtgctgggattacaatacccagtgtgcctttcttcattcattcattcaggagcctggctgtgctctagacactgcgaacacagcattaagtaggctcggcgttgggagcccgctgtgatacagcccgtcggctcatggaggagctgaccttccaccgggcaccatgggcacagggccttgggcccacagcacttttggggcccatgaaaattgtttgtttccacaatctcagaagaaaaaacatgaactattaggatgaaaaaaatgttttactatatagtattaatatttcatttgcataccaatgcagttgtaaaatataatttgtaatatctttttaatgaaggaaggggcctacagaggcacagatgcctcaggctcatgagtgtcagatgcagcccaaggaaacacatgctaaggatggaatgcaaaggagccagcgagtaagattcgagaagggcgtttcaggcagggagcatagctgctgcacaggtcctgaaacagggcgacggccataacagtgcgagggaaacaggtgacatgacaaaggccgggtgtggccacatctccaaggcataaagacaaagtgggacacagttaaaaatgatacgggatttaggccgggcacagtggctcacacctgtaatcccagcactttgggaggccaagtgggtggatcacttgaggtcaggagttcgagaccagtctggccaacaaggcgaaatgctgtctctaataaaattacaaaaattagccaggtgtggccgggtgcagtggctcacgcctgtaatcctagcactttgggaggctgaggcaggtggatcacttgaggtcaggagtttgagatcagcctggccaacatggtgaaaccccatctctactacaaatacaaaaaattatctgggcgtggtggtgggcacctgtaatcccagctacttgggaggctgaggcaggagaatagcttgaacccgggaggtggaggttgcagtgagctgagatcgcaccactgcactccagcccgggtgacagtacaagaccctgtctcaaaaaaaaaaaaaaaaaaaaaaaaataggcaggtgtggtggtgggcacctgtaatcccagctactcaggaggctgtgacacaagaatcactcgagcccaggaggtggaagctgcaatgagccaagatctcacaattgcactccagcttgtgtgacagagtgagactttctccgatgaagaatataactttctctgatgctattgaaatgcctcctttcaatagcgatggaaagtggaagagtaccaggagtagttacaaggtgtagatttccacataattgaacttgtccaactcctaaaactgtttaataacggacagtttagtgaagtaacaaactttccatctcttacatccaagcagaggatagaagccaaatgtcaggaatcttgcaaagggaaccctgcataaaaaggaagattgaacaagaggacaatcaaggtcctatccattcctacaggcctaaattagcatcttctgcatggaagtcttcaaagggaagcagaggtttcctgcaagtggggcaaattaaactacacgagaggccaggcgcggtggttcacacctgtaatcccagaactttgggaggccgaggtgggcagatcacctgaggtcaggagttcaagaccaaatggccaacatggtgaaatgctgtctctactaaaaatacaaaaaccagccgagcgtggtggtgggcacctgtaatcccagctactcgggaggctgaggcaggagaattgcttgaacctgggaagcggaggttgcagtgagccgagatcacaacagagcgagactctgtctcaaaaaaataaaaacaaaccacatgagatatgaccttaccccaatcagaatggccatttattaaaaagtcaggaaacaatagatgttggcatagacatggtgaaaagggaacacttaaatactactggtgggataataaattagtacaacctctatggaaagcagtatagagatttctcaaagaactaaaagtagatctgccattcaatccagcaatcccactactgggtatctaccaaaaggaaaagaagtccttatattaaaaagacacctgcatgtgtacatttgttgcaacacaattcacaattgcaaagatactgaatcaacttcagtgctcatcaatcgatgagtggataaagaaaatgcgatgtgataacctgaggtcaaaagttcgagaccagcctagccaacgaaaccctgtgtcaaccaaaaatacaaaaattagccaggcatggtagtgcatgcctgtaatcccagctactccggaggctgagacaggagaattgcttcaacccaggaggcagagtttgcagtgagccaagattagacgactgcactccagcctgggtgacagaggaaaaaaaaaaccaaaaaactcaaccttgtaaaaataactcaactcttacctttgattatggcatcctgtaatgaaaattttaaatcctatatattctaaaggttttactttttaacttctggatattagtcttacttaaggacttcccagacaggtgtgatggatcacacctgtaatcccagaactttaggaggccaaggcgggtggatcacttgaggttaggagttcgaggccagcctggccaacatggtaaaaccccgtctctactaaaaatgcaaaaattagctgggcctgatggcacttacctgtagtcccagctacttgggaggctgagacaggacaattgcttaaacctaggaggtggaggttgcagtgagctgaaatcacaccactgcactccagtcagggtgagagtgagaccctgtcacaaagaaaaaggaaggacttccctaccacaagtttgttattataatatatatgaagaatataaacttttaaatatatggttaagttctttaatccatatgaaatttattttggatagattttgggatggaaatttatgctaacaaatttagcatgaggtaaaaaactttccctttttttttctttaaaaaaaagacagggtcttactttgtcacccaggctggaatgcaatggcatgatcatggctcactgcagccttgaactcccaggctcaagtgatcctcccacctcagcctcacaagtagctaggaccacaggcatgcaccaccatgcccagctaatttttttattttttgcagagacagggttttgctattttgcccagactaggctcgaactcctgagctcaagctattggaccacctcagcctctcaaagtgctgggattacagatgtgagccaccacgcctggtccctaacataactttcttccaaataactggccaactgtttcaacctttttctgtgtgtgtgtgtgtgtgtgtgtgtgtaaacagaaaagtaaaatttctattttcatttgcaattccttttggttttcttttccgtttgtttgctttttgagttttttgtgatttttttaagttcagaaataaatgtgcagttttgttttataggtaaacttgtgtcacagggtttgtagtacagattattttgtcactcaggtactaagccaagtactcaatggttattttttctgatcctctccctccacctgccttccatcctcaagtaggccccagtatctgttattcccctctttgtgtcatgagttctcatcatttagctcccacttataagtgagaatgtgaggtatttggttttttgttcctgcgttagtttactaaggatgataacctccagctccatctatgttcctgcaaaagacatgatctcgtgcttttttgtagctgcatagtattccatggtgttgttttttttttttttttgagatggagtctcgctctattgcccaggctggagtgcagtggtgcgatctcagcttactgcaacctctgcctcccaggttcaggcaattctcatgcctcagcctcctgagtagctgggaatacaggcgcgtgcccccacagctggctaatttttgtatttttagtggagacggggtttcatcatgttggtcaggctggtcttgaactcctgaccttgtgatctgcctgccttggcctcccaaagtgctgggattacaggtgtgagccaccaggcctggccacattttctttatgtaatctgtcactgatgcacagttaggctgattccaagtctttgttattgtgaacagagctgtaatcaacattcacatgtgtctttatggtaaaatgatttatattcctttgggtatatacccagaaatgtgaaaagataatctacaaaatgggagaaaatatttgcaaatcattcatctgatgagagtctagtagccagaatagataaagaattgttacaactcaacaacagaaagacaacaactcaactcaaaaatgggcaaagcaagaggtcaaggcggtggtgagctatgatcacactgctgcactctagcttgggtgacagagcgagactccatctcaaaaaaaaagcttttttaaatgggcaaagcacttaaacagtcatttttccaaatcagctatacaaatagccaaccggcacatgcaaacatgctcaacatcactaatcattaggcaaatacaaatcaaaacaacgagataccacctcacgcttactaggatagctactatttaaaaaacaaaataacaaatgttggtgaggatgtggagaaattggaacccttgtgtatgggaatgtaaaatggtccagtctctatggaaaacagtagggcagttcctcaaaaaatttttaaaaaatttccatatgatccagcagctctgcttctgggtatataccgaaaagaactgaaagcaggctctcagaaaaaatatttgcacactcatgttcatagcagcattattcacttgggtctgttgatctgtccatccacagataaatgaacagtggcctatacatacaatggaatattatttcgtcctaaaaatgaaggaaatcctgatacatgctacaatatggatgaaccttgaggatattatggtaaatgaagtcagtcagtcacaaaaagtcaaatatcgtatgattccacatatatgaagtacccagaatagtcaaattcctagagacagtggagcggtggttgccaggggctggtaaatggggaaatggggagttacgtgttcaaaggatgtagactttcagttttacacaatgaaaagagttatggatgggtggtggtgatggttgcccatcacatgtatttaataccactgaactgtacacttaaaatggttaagatggtaaatttcatgttatgtgtatttcatcacaataaaaaacaattttttaatcattcttcctccatggattttaaattttgtccctatgacatataaattcctatacctcacgtgtatacatgtttctgagctccattctgtttcgtttattctatctcggcatttttcaaacaataaggcacaatccattggtggttcctaaaataggttgaatagattataaccaccattattgttgttatcttctaatgaagtagaataggatagaaaacagaatacgtctaacatagtaaagtattaacccatgaaatttgtttatatacatacatatgtataggtggtgttggctgaattgtaaaatacatttgttactatggatttgtagctcaaagtttaagaaacactgctgtaattatccctatgtcagtattatcccattccaactacttcatagcaataaaatttataaagtgttttaatgtctgatattaaaataagcaagcaactcccttccctccccacctcttatctttcaaaatttttcaggtaaacttaagaatcagcttatcaattaaaaataatacttttgatattccaattaggatgtatttaatgtacagattaatttgaatgtaactgacatctttgactgaattttcctatgtagaaatatagtatttccttttattcagaaaaggaaatacatgccatatttctatttcagtagttttatgatttattcacaaaggtcttaacatgtatcttgttagatatgtccctaaataattgaagtctatggttgatatgggaatgagttttgtttttgtttttgtttttttgtttaagagatatggctcttgctatgttacccaggctggtgtcaaactcctggcttcaagcaatcctcccacttcagcctcccacagtgctgggattacaggtgtgaggcactgtacccggccctgagacttttgagataatttctaactggttatttcaagagaacaaagataatattgatttttacatatcactcttataaccagctgccttaattaagtctctaatcagtcctaggaggttttcccccatttattgttacgattttctggtaggctattatgacatctgaaaattatagtttttcctatatcttttcagtttttatatatcccttttttaagaaaaatcactagctagaacgtcaagttcaatgctacttgagttgtgtcttgctcctaacttaatctgttccaccattaaacatattcattgtaagtttctatcagatatattttatcaattaaagacagtttcttttgatttacatcttattgtttttatcacaaataggtgccgaatttcatgaaatacttttttagacttctgtcataaatatattaatttttcctttaatctgttaaagtaatataatttattacattacaaaagttactattattgaaacatccttgcattcttgtgatgcaaatggcttacttcgacatgggatatgttactctttcaatataattgctagcctgaattttatttaactttgtactctcatatctatgtacttgattttatatacatacaactttgtgttttatttggctttagtatcatgttatattagcctcacagaaagaattacaaagtgctctatactataaaatagtcttataacatagggaaatctgtttctttaggatttggtaaaattcacctataaaaccatatgggcctcacatctctgactacttgttaaatttttaccatgattattgaccaatttaggtttttaacctctttctgattcaaacagaatcatctatttcatctacattttccattttttggttacatgtgcatatatttgtatagtattctcatctatatacatagtaatatcccttttcttgtttcatatatgttctataattatacattttgttctttttcttaatgaattcaccaaaggtttgtttaatttattgatctattttagaaaacagtttttggttgtcagtttttggttgtattttttaggtttattggcttatcttcatttataaagataaaagtagactgggcgtggtggctcatgcctgtaatcccagcactttgggaggccgaggcgggtggatcacctgaggtcaggagttcaagaccaccctggtcaacatggtgaaaccccgtctctacaaaaatacaaaaattagccgggcatgatggtgggtgcctgtaatcccagctactcgggaggctatgacaagagaatcgcttgaacccgggagctggagggaggttgcagtgagccagtatcgtgacactacactctagcctggggactgagtgagactccatctcaaaaaaaaaagagagagagagatcaattttttttcttttggagggattgaggagatactggttaaaaaatacaaaatttcagcacaatgaacaaatgttcttaactgaaaacagaggaaaaaagttttcttctttctgctttgggtttgtcttgtagtggagggtgttcctttggctcacttacttcccatttttctaataaatgcatcttcttttcaatgtttcttggcctcagcccaccagaacatgcatctgatgcatgttaagactctggggttgacctccatgcctgttcctttcctcgtcccgcttcctatctctgactttttgatcgttctgcaatgttttgctctctatcttccagaccgctaatttggtctttaattctatttgcttctcaagccaacctagttaaccttttaagttcaatcaccacatttttaatgtccatgaactttcttgttctaaaagatcttttttcacaacaggctacttagattcactatacagcagctcaaatctctttgaagataccgactaacatgtttttggcttctgctatgcgccccaaagtctgcttactctgggctttttctttcatactatttattctcctcaaatgtctggtgatcctttgatgtgcattcacactttggaataaaagactgggccaatcaacaagggaaaccactgcatgcttccagtctggtattaacgctctcctggggaaggccagctacctgcaggctccgtgtaagaggacagaaagtgtccaatgatgggctttgctttaaggtatacaagtaaacaagcacggaggcagagtgggggacaaacaccaaatctgccaaaacagtctctcctccagtggcgaaggacgttcacagataccgcctgctagagggcctacatttccttcccaggacccctgttactgcaggagcccgcagggatctgacactctgctcggcttctctctcaggccccaacaccccctcaaggatccctccccagacacagttctcagtttttagccagagaccattgtataaatgtaatgcttcgatttcctaaatattactctagggccccttcctgttggtggttgttagtcactgtaaactcagcttttaatcccccccttttcttttgcacctgtgttttgagttacaattgttttgtttttgttttccttttgtcaatataatcccatctgttttcagtcttccaggaattcttcataacttttagtttaatagaggtaggcatcctttcaaattttctaatactattacagatgttttaaaatatttaccttttgttatttaaaaagatttttggcaagagagaagctggatgcatgtgttcagtctgccattttactcctaaaaatccagattgtcctcctgaatgcctaaatacttttttctaatttaaaatgctttattcaaagcaccctaaactagtacttcgctaggaaactgaaaaatattcctcttaattctgcttgctagtgaacagaacagactttaggcctcttgaattcattttaaaagtaactacagtccagttaaacaaggtaaggtccacaaaagaaaagacgtttaagcaacattttccaaagagagaaaaaaaaacacatatatgtaaggtttgatgagacaggcagtcctagaaaaacaaatggtacttcaccagatttcaaatgtaaagatttattcatttacaaggaatcaaaagtttgatccaataaaaaggcagttacaataaatctaaagccaatgaggattaagtttgattttttcaagcttgatttgatttctataaaagtataaaccccaaatatattgcttctacacattatatgcacatcagatgccaagtcaacgagtatttcataaatgtataacataaatatttaagaaagcaaaagagtataaagaaaagatgtggcctttgtcttttaaaaacagaaaatctgaataggaaaaaactatacacgtatctaaatctccacacagagataatgatagacgtagaagatggtgtcatgttacatcccactttttcagctcttacagaattgctacagtaattcacaagtatggtgagggagggagagtagctgaaacaggttgttgttgttgttgttgttttttatctgttattttaggttttactaatggaagtattgagactagaacaaaaagcacatactagatagatacttacctgaccaatcctggcaagaggactattgtctcactcacatggaattttaaaaatctgaaagtcttacataaaaatccaggtttccagtttgtcttgagtagtcagaaaagctgacaaatccagccccacattcctatgggaaatcatcagctggtgtgctggtaaacgttaacaactggctctctatagaagaaaaacaaaagcaaaagcccctgatctgtatagcatttgccatggtgtaaatacacccatcatggctgatttcaagctcccaacgtgatgcctggaaatgacaggcacaatcagctcatggacaacagtggccagagctgagtggtggctgccccttggacaggagttacgggccttccgtcctcactgctccctatagtcttacagtggctgctacctgcactggcaccagcccgccccacccctttctctctcttcacccccaagaattcctgagccagatccaagctggtggtagtgctgggcacaatgtcctcctaatcctcatcagaccacatggaaaaatcattgcttaggtaccacattttaggaggggcactgccaagcctgagtaggtaaagacagcaatgagctcagaagacatctccaacacaggatggctgacagcactggagatgttcacaccagatactgaccggggcagtgactctcaaagtggagagagaagagatgatgggtagggagaagtgcaccaaatgaaaaaaaaaaaaaaaaaagaactacttcatccaaaaattcttgactctgatatgttaaattcaattgcaaatgacattaaccatccacaacacttttatgtgtattaaaggaaaatatggatctctaaggattgtgaaacatttgtttaaaggaaacagtcaccctcctcaagtgtctaaacagctattcagtggaagaatctattttcagcatccattatgctaattaacaaggcatgttattttcaccagtggatatccaatttctaacatttattatgctaatttgatctgatataaaactataaaaatagcagagacactggtagtagctgtctctggagggcagcccttctgattaaaggccagatgtctagccctggatgcccccacttagagaatggcttaaataagcacctaatccacctgatgttttatgaagccttttgaattagaatagactactgggagatggtattttttgatgtcattgttcacaaaagggaagcaactgaaagcgccgacttttagaaagaacagaaacatcagtgcttattttaaacctaatgggagcttaggaacatggtccagtcagaggaggagcgctcccctgtggtgcctgaagcactcgactgtccacagctgccgacactcacctgggaactactgttctgatgatcccagcagcaacgcacaattcagtgcgccagcaccaaaggaggaaggaagacagaggtttgtttgggttggtttttttgagggggggtggggggatgtttattttactttaatcttgaattaggcatccaacttctcctaatttttattctcttaattttttctctgatacctcccccacccagtctactgcaaaggctcttgctataagaagtaatgaaaataggccaggcgcagggtctcatgcctgtaatcccagcactttgggaggctgagacagcggagttgcttgagcacaggagttcaagaccaacctgggtgacgtggtgacaccctgtctctaccaaaaatacaaaaaattagctgggtgtggtggtgtgtacctgtggtcccagctactcgagaggctgaggtgggaggatcacttgagccccagggggcggagcttgcagtgagccaagattgtgccactatactccagtctgggcaacagagcaagaccctgtctcaaaaaaaaaaaaagtaaatgaaaatgttttgtaaactacaaagtattatcaaatagaaatagtattccttggaatttgtacattattagtagcaacagtgatctttaaaatgagtcatttctgctagtgtttaataaattaattccttagagataagcctccctgcaggggctacttcattaccaataaatgtttactaaatgcccaccatatgcaccaaatggtagacgattggaatacaaaagcagaagggagcaggattctcgtcctcaacaggcaaggatctgctatagactcacaccatccttcaagtctggccaccctccccatgacactcccttctatgttgcctctgggttatcttgtctctaattaaacactttggcaaagtgggatctcgttacctggggaagcagcccttttcccctgaatcagttcctttccttcagttagctgaggtacttactgggaaagaaaactccatacatatgaaggggagtcctgtggcagcgtgcacctgagccatcacacacacaagagggcagagccatgaacgggggatgaaggactgtccccgagcacacgctaccacacgtcctgaacgtacggctggttacagctagttaatattttggaaatgctattttattggctaggaagccttttccaaatgaaaatctctttactgatagattagtgaaggtagtatagaggagttttattttgtttttgtttttttaatcagcagaaaagtctttcccgtcctctgggcagacagatagcagagaattacgcgcttaggtttcacagccaggctgcttccgttcaattctcagcactgccacaaccagctaagtgtacctgggcaaactacagaagccctataaacctcagtttccttatctataaaatgggactaattatagtacctacttaataggggtgttctgagaactgaatgagatgatactgtaatccttcaactgaggtccccagacaaatgctcaggagttcatgagaaatttttacttttgttatttcatggagaatcttttttaaaatttgacataagcatcctctgaatcagatggctaggtgctatgtcaccaagtattgctgtaagatttcagtgactatgtttgtatttttctggtctaatgaaaaaaggggtcaggcgcggtggctcatgcctgtaatcccagcactttgggaggccaaggcgggtagatcacttgaggttaggagttcaagaccaccctggccaacatggtgaaaccctgtctttactaaaaaatacaaaaattagctgggcatggtggccagtgcctataatcccagctactggggaggctgagtcaggagaattgcttgaatctgtagggcagaggttgcagtaagccaagattgtgccactgtactccagcctgggcaagagtgagacactgtctcaaaaaaaaaaaagaaaaaaggacagagacaaacccaatatataactgaggcatttgcactaagaaatagtcaaattatgtcaccacaacctgtatgatgaaaaattttacaagagtttgcaagatgaaagtggaggggaaattgcattagccggcaagtggcatgataggtagactaacattacagaaccaaatccggcagactggcagcatatgccacagttgtggaacagaggtttggttgcagcagatcttcatctgttgtgtcacggctagcttttattggctatatttagtttataaatgtgtattctagttatgaagttgtaaagaaactgcaagcataagggccaggcccatttttatgctttatatattcaagtaacataataaagataatcatattgtacttacgtaagggaatgttctcattcttttttttttttttttgaaatggagtctcactctgttgcccaggctggagtgcagtggtgcaatctcggctcactgcaacctctgcctcccaggttcaagcaattctctgcctcagcctcccgagtagctgggattacaggcgcctgccaccacagctggctaatttttgcatttttagtagagacggggtttcaccatcttggccaggctggtctcaaactcctgacctcatgatccacctgcctcagcctcccaaagtgctgggattacaggtgtgagccaccatgcccggcccaggaatgttctcattcttaagaaatgcacactgaattctttaggagtaaggaggaatgatactggccacttactctcatatagaaaaataatacccaactatatatacatacctatgtgtgtatatatatataaaacatgtaccaaaagacagagagaacatgtgcatgatgaaggaaataggggtagataaaaacaactggtgaatctggttaaaggacatgtggtagccaaagaactatagcttctcataactagaaggaatgcacttaaaagttcagatccagagttcccctaggaggatcattattagaccagtgattcgtgtggggaaagggacctgatgtcagatgcacctgggaaggctttgtcagaatgccagcaagtaccccgtctcctctctgaggatcgcggatagcagcgagccactcttatggatgaaaatgcacggcacacccctctggtattttaggatatgaaagtaaaaatcactgatgcagtgatcagataagcctccaaactatccgaaatgatcacagaaggaagtacttaatgaacactacagaagagctggcagaaaaacgatccaaaggccatgttatattgagcattatttttagacttaacttttctaaagtgcaactttacaaaaccaggagtcctcgaaatacatagagaaacagacagacataggcgacaaaacaacaactgcatttcccgtttgggctttcctgatgaaattctcccacagttgcacacacagttgctagaaagcaagagtacagtgctctttccctcactaagggaaaaccagactcaacaccaagactccaaggggaatgggcaggaatgacatcagtatgttgttctctttccagggcaccagaggacttggcactctgatcacaagtaaacacaactactccattagaggcagttcctccctattctaagcctttattattcctgggttttagagtcagtactccagaaaatggtcactccctttggtgaaacctatttgtctccctcctgtgctctggggcatgcctgcccctttgctgtaccatgcctcaatcgagtccaccttgtagatgctgatctactccggcatgtctgaatattaccggctccttttattttcatggcccacgtggcagtcagatcatcccagtgcatacaacggaggagccaggagtaaagtttatcacacgaaggagatgtaaaccaaatcatgttttttcaaactgtcggttccaatgtgttagtggatcctaaaatcaatgtaaggagccatgactcaacttctatttaaatagagtgcaaagaccagaaaagacacatcaaactgcactgtgcaaagtaagggtaaccattgtctcctctttttatttttttaaacatattttagagacagggtctcagtcgtcgcccaggctggagtgcggtggcaccatcacagttcactgcagcctagtactcccaggatcaggtgatcctcccacctctgcctcccgagtagctgggaccccgccgggtatgtgccacccatgcccacctaatttttaaattttttgtagagatggggtctcattttgttgcctacgctggtctcaaactcctgggctcaagtgaccatcccaccttggtctcccaaagtgctgggattagaggtgtaagccaccacctgagccagtactgtctcttaaaacttttggattggttatctcagtatatgtatatgaagatcacaatatgaaatggcttttttgagatggggtcttgctctgtggcccaggcctgagggcagtggcgcaatcacagctctctgcagcctttaactcctgggctcaagccatcctcctgcctcagcctctggagtagatgggactgtaggcacacaccaccacacccagctaattgtggtttttttttttttttggaggatgaggtcttcctatttttcccaggctagtctcaaactcctgggctcaagcaatcctccctcctcagcctgccaaagtgctggcattacaggcatgagccaccatgcccagcctaaaatgcttttttactgtgtgccacagtcaaccatattcaaaagccacagtattagatgctgagagaaaaggagagagaaagagacagaaagatcaggagtgggcccagctgaactagtcacaggagcaaaccccataagaggttcacttggctgatgcagaagccgaccagaagtcaccatgatcttgaggaaagaaatcataagagaaaagagtatatgagtgcaactaaacattacgttatcattaagctgacctggtttgctttcctttttttaaggcaaatgtagactacagcctagaaatataaacatattccatacaagagggccatgtgtccccattataataaaagcttgggttcttaggaatgcttacttgaaaggagtatggtaatcaatgcttcatcaattagtcaaccttcaataatcatctccaaacaaggagttagtgaatttcttggggcagatgcaaacgcaacccctgcaaaagctgctgtccttgccacatcactcacaccagccccatccagccttgctgatcatctgcatattcattcaaaagcactattccctccaccaaaaccctcaaagttttaatttaaagttattttaatctaagtgaggaagtcagcggatgcaattagatcttaaaattagaagatatggttaccaaacttaaccattttgtaaacattgcaataaaatggaatatcatgttaaagacatgccaaggtgttgttttatacattagcaccaagcaccttgccctcccattttcatcaatttaccctatgaagaaacagctggaggctggcacagtggctcacacctgtaatcctaggtgtgaggattattttgggaggccaaggcgggtggattgcctgagctcaggagtttgagaccagcttgggcaacatggtgaaacccctcctctactaaaatacaaaaaattagctgggcgtggtgacacacgcctgtagtcccagttactcaggaggctaaggcacaagaatcatttgaacccgggaggcagagattgcagtgagccgtgatcgcaccactgcattccagcctgggcgaatgagcaagactctgtctccagaaaaaaacagctggaaaaaagctgggacttcccagcaccagtattaccaatcactgaaaggagaggttcctcaagcacaaggaagaacagcaatctcaagttgtatttccattcagtaccttccagggttaccctagacactgattacatcaatgtctcatgagcagtggaatgattattttaagtaaatttatcccttccaggccatccagataagcaactattgtgttactacaaaaccaccattttactatttattttagctctacagtgtactattgaaatatttcttttattctccactagtagacatactgaagccttaatactatcaggtattatagactcaagtcataataggtactgttcccttcaaaatgctgaaacaataacatcctcaaaaatccccaagttttcagttctccaggagcaaaggaaaagagaatcatttaggtcaccttgatgagctgggaaactgatctcaagtagtagaacatttttctgtttgtaataagaggcccaaatcagattacattcacaaggcttttttaaagtgttgaggagaacgttaacctcccctaaagtctgagagcaatttacaacaaaagctaaaatagaattaatgtagggcagagaaagctgagtcaggctgaatcagcccaagtaagtctaagaaatccactgaaagacatcgaaacctaatgttcaactttgtctataaattgtatgacttttcacacacttacataataatacataactaatgaattaggtaacagaaaatacaatgcctggttttcgagctcagcatacttgagagtggtacacataacacaagagtaagaaaggtttcccaaaaatgttaataataattgaagacatctttggacttttttcctctcattcaaatgtaaaaaatgatcctaagaagctgaaaccatgatacagggattctagaattatgccagcccatctctaaagcaactggagtcatttgagtcaaaagaatgttcggctaggcatggtagctcacacctgtaatcacagcagtttgggaggccaaggcggatggactgctggaggccaggagtttgagaccagcctgggcaacatgatgaaaccccatctctacaaaaaaaagaaatagaaaaattagctaggtgtggtggcacacgcctgtaatctcagctactcaggaggctgaagcaggaggattacttgagcctgggaggcagaggttgcaatgagctgagatcatgctattgcactccagcctaagtgacagagcaagttctgtctcaaaaaaaaaaaggagaatgatctaggataaagtctacagtctattttctgattgttagagccttataagcgaatttatcctcattcttcaaaaacaccaatgggctgtgttcaacacagaaggaaagtaagagttcctctttcccttagcagtatcgttttgtttctccgaaaacagctctcccaaaccataggttccaaagggagtcttgcatctacattaccagctgtgcttgtccccacttctatacattttacagccataagcgtctgcacacaaacatattcatgagtcccatgaaggcaggaactgtcccttctttatctttatatgccccttatatataagggttcaatcatcactcactaaattggaaactaggtaggcctccaactggaacagaatgatcaaaagaggagacaagaaagtctttactctccccacttaaagacacaaaaggttaccctgaggtaattatttctatttttcattgtataaacagtattttgttttattattcctaactaaagttgggcattgtaaaagagagaaattcaaactactaccttatataaaaacttctaaactgactatattggcgctcaacaaagtctgcaaatagctattcaaatcagccacttctccagggtcgtcactgctccctacagtcttacagtggctgctccctgccctggcaccagcccgccccacccctttttctcccttcacccccaaaaactcctgagctagatccaagctggtggtaggcctgacacgatgtcctcctaatcctcatcagatcacatagaaaaatcattgcttaggtaccacattttaggaggggcactgccaagcctgggtaggtgaagacacagcaatgagctcagaagacatccccgacacaggatggctgacagctctggagagaggtgatatgcaattgtagaaagtcatatttcttgcaatcttagaggaataaaggagttttgttgttgtttaggtaaaaagccttcggcctgagctgcctctcccgagctccaattcctcagattcccatttaacatccttgaacttcaatttctttagtaaggaataattatacctcaccatcaggtggttatatcctcacaacaatcaaaagctaagtaagtgtgaattatacaagaggttgaaaaaaccttactagatacctcacgcaatcactggtagaatgatgatcttgtaggggtggtggcaggagggtgggaagacacagacgcatgatgataaggtttggatatttgtctcctccagatctcatgtaagaatgtgatccccaacgttggaagcaaggcctagtatgaggtgtttgggtcatgggggtggatccctcatgaatggcacggtgatgagtgagttctcactctactagttcactcaagagctggttgtttaacagagcctggcacctcttcctctttcttgcccttcctctcacatgtgacatgcctgctctccgtcaccttctgccaggagtaaaagctctctgaggcctctccagaagccaagcagacactcatgccatgcttgtacagcctacagcaccgtgagccaattaaacttcttttcttaataaatcacccagtctcaggtattcctttacaacaatgtaaatggactaagacacatgttaatacagaagactgggagaagccctatcagaagccaacaatgtgccaggagagagggcaaggcagtcccaaccaggagtcaaaagctaatcagtaagctcagtacacacgacagcccgttaatcctcatcaacactttgtaggtaggtattgttgctccatgttactaatgagaaaactgaggcttagaaaaataaaagtctaacagccagtagagaggtagacctcagattttaagaacatacacttgctgtctgccaatccaggaaggactaaactggaaagagctcatcttcgagaacttataatgtataaaacgtcaacctaaatttttttgttgttattaatattttagtgcttagaaaaagaactgttcctacatgaaacagtaattcttacaatattgtttagcaagtaatcttaactttgaacaagaacgtttaaaaataaatatattgttgggtgagcaggaaaatcactttaaaatgttgtagaataatcttccaatattgttcctttcacccatccctcaaactacactaatgaacattttttttctcccagtatttgctctttctcagcaatgcaaacataattttcatgactgttttccattatgacacatactgtacatttccaacgacataaatgacgttcgatgattttttttcccatctctagctctctgctggtcaattagtctatcaactaacacatatttatctcaacatctgagacacataaggagtatcttcattccagatcactgatagtaacctgagaaggaaagaacgacctacaattaacggttcaaactctagcatacaaagttaaaatactgattaaggccagacgtggcagctcccgtgtgtaatcccagaattttgggaggccgaggtagacggatcatttgaggtcaggagtttgagaccagcctggccaacatggtaaaaccccgcctctactaaaaatacaaaaaaaaaaaaaaaaaaaaaaaattagctgggcattgtggcaggcacctgtaatcccagctacttgggaggctgaggcagcagaatcacttgaacctgggaggtggaggttgcagtgagccgagattgcaccactgcaatccagtctgggtgacagagtgagactccatctcaaataaataaataaattaaattaaataccagttaaataccagtacccacacttgagtccacgagtttgaaaccagcctgggcaacacagcatgatcccatctcaaaaaaaaaaaaacaaaaaaaaaaacaaaccagtatccatagttaagtgccagttaaaagacttacatgttcttgaaaatacaaatgaggatgtgaagctgttatctctaaggaaaaccaccaaaattaacagcaaatagccagaaaaccatgtagagaagcatgtaattttgttatggagcagaagacaagggatcattaaagcacttaagctattttataatagactcctcacttacgtttttcgtcatcagcatgcaccagagatgctgccctggacaaaacatccaatggcgtctccattcctggttggagcctaagaggaaaaaataaaaggggaaaaaataatttaaacagaattcaaaagactcttagaatcctagtcattaacagaatgagtcctcaaccaaatgcaaatcattcttctaaggatgaaattcttcccacatgaggaaacagaatgggcttggttcagggagagagaaaagggttaaactccatttagtctactaagctaaactttgccaactacaggaagcagctgatgtaggaactaaaagaagggatattgtgaatattcatgcccatgttatttggtgcttatgtttatgtgcatgcataacatgcctgtataaacatgcccaataaaagaaaggttttcagaacaacggctgctctatgaacacagcatcactaccagtgaggtggtgcagcttaacacacgccacgtactcatggaaagctgtgtgagaaacccactggtaggttaattgatattttaagtccaataagaatctttatgttaaaacgtcatgttttgtataatggtatattatataatcaccacctatcatcaatttatctagcatcatgttttttaataagactggatttttattgttgtttccttaaattacagcatactataaaagctaaaacagcaaaagatttaaagctcgaggaaagccctggaaaaccagaatgctttttacccagtttcccttttctgggttatttaaacacacacacagttactggcacacacaccctactagctcaccagctgagaaaaacaactccttaactgtaccactttacagacacttggaatttattcagcattcttcaacacttatggagtacctactacgtatgcaccggtcacaacatgtggcagaccagcttttctttgtaatattcatacctcaggcctccaaagaaacactgatccacgaggcatggtagctcacgcctgtaatcccagcactttgggaggccaaggcgggcagatcacttgaggtcaggagttcaagactagcctggcgaacatggtgaaaccccatctctattaaaattacaaaaaattaggtcgggcgtggtggctcacgcctgtaatcccagcactttgggaggccgaggcgggcaggtaacctgaggtcgggagtttgagaccagcctgaacaacatggagaaaacccatctctactacaaatacaaaaaaattagccgggtatggtggcccatgcttgtaatcccagctactcaagaggctcaggcaggaagatcgcttgtacccgggaggcagaggttgcggtgagccgagatcgagccattgcactccagcctgggcaacaaaagggaaactccgtctcaaaaaaaaaaaaaaaaaaaaaagaaaaaaagaaaagaaaagaaagaaacatagatccctgatcatgcaatatgacttcattcagtaaacgttaaatatctacaaggagctccaggcgggaaaaataaacaaagcccagtagctgccttcgaggagctttcaatctgcacgggaggcaggccaccgagacatctagtttaaggcagcattcttccaaagcattctgcactgggtgttcatattttgtaagaaaaaaacgtttttctatggtaaataagtttgaggaagcctggagtaaaccaagctaagcagcgtattttcctccccgtgcctttaatctcccgttgtggggacagaaagccctgtacacgcgaaacctcgtagacgtcatgagccattttcaacccaaaacgcatctcagggaacatctggggaaaatactgggttagggcaaaatgtgcaaagcgtcaaaacagtgctagaaacaaagtcctacagaaataacagatgaattctgaaaggctttgtgaagaaaacagaacttgagcggaggctttgaagaacgaatataaaagttcctcccccagaagggaagaacagaagcagaatcggtttaacaacacgctgcccaaatcgcctacaagagtaaaatggggacagaaagtaagcgacaaggttggaaatttagattgggaccacatcgtgaaaggactgagggcttcgatgggaccgcggcttgacacgcattaaggagccactgaaaactccatctaagcagaaaagcggcttagtcatccatgcgttctgggcaagttatcctggccgcaccacgtggaacggagtagatagagctcgggaagctgagcgcagggcggacaacgggaaggccagagccgtgggcaagcacgcggagggcagcgaggggcactggcaccggagccgcggggaggcaggaaaacgcagaggcggagctcactgagcttggcaggcagagagaggaggggagggccacggaagactaagagtggcagggaggcaacgacctcctaacacacgcacatgtcttctttttcagagaggatgggtaaaagcagcggtctaagagggaaaacctaacagtgctcacattcctgatcttctttgtaaaaacagaaaagaccatctcctaagaggaaggatttgtgaacttgttcaacaatggagaaaaccaacaagaacttggaactgactaacagaaaaaagtctgctgaactcccaagaactaggtaatattctcttcacccaagccagcttcctattcaggaaagatctgggtttaaagtcttgtgatttggtcgagaccatcctggctaacacagtgaaaccccgtctctactaaaaacacaaaaaattagccaggcgcggtggcgggcaccgtagtcccagctactggggaggctgaggcaggagaatggcatgaacccgcgaggcggagcttgcagtgagctgagatcgcgccactgcactccagcctgggcgacagagcgagactccgtctcaaaaaaaaaaaaaaaaagatcttgtgatttggggtagtaactgctgataagcatcctactttgcaataatacagcatttagactcataattctctaaattaattttaccccattaagttgaaggacaatgctttcaaaattctagacctaaatagattaatacataccttaggttatataaagtatgcacagaaacaaaatatcaaagcataaaagtatcaaatgacataaggtagacccagaattctagcatagcggaatattagacatttaagtttatacagatgctatgaaatcctaaacccccaagcaacttacattcaaagtaggtagataagataatgggtattaaaggttcatccacaaggcacctgccatctgctgcaaccttattaatgaaatcaaccaatgtttattacacaattattctaagctcagcaaagtgcccagaaaaggttaaggagaaacagaagatagatctctgctttcaaggagtcacgctcttgttcggaaactaaattttataagataggataatgacaggcaaaatcaaaaagaggataaacaaagactaaatattatttaaaactaaaatgggtacagtgtcataaaagagatcaatgtcagctaacgtgtttgccttgtgcacatctattttttgtttgggggtggtttgtggatgcgtgtgtgtttcaaaaagccacttggaaaatttccttccccggttgccctgccccaggcagtcactctcctctctggcctccctcaccttcctggatcgcactgtgtttctgtatacttcctaggtgcaaggaccctgtcttatccccagtgcagtcatcctgagtcaacaacagtctgagaaaaggcacaggggcaggaatgagcacctgggacaggtggccagacctgactagctagaactgaaaatccacgttaggaagcagcagaagctaaattcaggtgagcctgatgcgggtggccttaggaaagagctgacagctggccttcaggttgatacttaatgtcacaggcaacaggcagttgtcatcatctgtccctgagctggcccgtgacatgatgttcacactattttagtttagaagttccatgcgtctaggcatgtggctcacgcctatagtcccagcactttaggaggctgaagcagaataattgcttgagctcagcagttggagaacagcctgggcaacatagtgagaccccatttctaaaaaaaaaaaaaaatttaaataaaaaatgagctggaagtggtggcatgggcctatggtcccagctactcagggagctgaggtgggaggatcacttgaccatggagggttgaggctgcagtgagccgtaattgcaccactgcactccagcctgggcaacagagccagaccctgcctcaaaaaaaaaaaaaaaaaaaaaaaaagacgaagaagttctgtgtaggatggtttgactggagagggtgactccagaagttactggaggtggatgagttaagaggcttctgtaggaagcaggtgcaagataaggacaatacagctgggacatgagggacggggaccaagcattatctagccatggaagaacaaagcaaaggtggaagataacagttattaaaaaaaaaaaaaatggtcttccaggtgggtgtggtggctcagccatgtaatcccagtgctctgagaggccaaggcaggaggatcgcttgagcccgggagttccagaccagcctgagcaacacagaaatttggaaatttactcatttctacaaaagattaaaaaattagccgggcatagggacgtatacctatagtcccagctactcgggaggctgaggtgggaggctcccttgaagccaggaggtcgatgctgcagtgagctatgatcacaccactgcactccagcctgagtgacagggtgagaccccatctgtaaaaaacaaacaaaaagtcttctgcattttatgtcttatatacatcctatccacagcactaaataaacccaataaaacatattgataatgtgggaggaaaaaccatggctacagtattagatggaggatcacaccacattgacaggcaaatcagcatcatgattatttcagcatcaaattagcatcaggattaatatgaatccaggtaaaccacttccaatctatgtaaccctgggaaatgacaacctctgtgtgtctatttcctcatctggaaaatggagatattaatattacctccctcatacggttttctgagaagtgaatgggccttataggtattgaaataattatttgccaaaacttatgcaaatatattgaataaatcacaaatgacagtaaatgtactgaaaatgacagggcactgtccactactttagctagcgtggtctgggaagatttcgctgaagagaagaatggaagttgagacctaaagaatgagaagaattagacccagaaagagcagggagggtgggaaaaggtgggagacagcagcacatgctgagaccaacacacaaaaaagctgggcaggtgatgtggggggcggccagggtggctgccctgaagtcagcaaaagggaggcctgaggtgggcagcacagggccaggtcacgtgtgcctggagggcctgcaacaccgatattttattttaagtccgtgaaaagtcctggaatggcccgaaaagcttcaagcaaggaagtgacaagtttattttatttcctttatgagccacaaattatcctctaccttacacaaaaaattatgctgcatctgaaaaacaaatctaggtctatcccaataatgtcttatttctgtggtagttttgcattaggatatagtgataaccaaaaataatccattgaggaccaggcatggtggctcacacctgtaatcccagcactttgggaggctgaggtgggcagatcacttgagggtgggggttcgagactagcctggacaacatggtgaaactcagtctctactaaaaacacaaaaactagccaggcatggtggtgatggcaccggtaatcccagctactcaggaggctgaggcagaactgcttgaacccgggagacgggggttgcagtgagccgagattgggaaagtgcactccagcctgggcaacagagtaagattccatctcaaaaataataataataataatccattgaaatgctgacacctggaacataacaacatttaagtgagtggagtgtggctctagaaaaagatacagagggccaggtgcagtggctcatgcctgtaatcccagtactttgggaggccaaggtgggcggatcacaaggtcaggagttcaagacgagcctggccaacatagagaaaccccgtctcttctaaaaatataagaaattagccaggcatggtagcaggcacctgtaatcccagctactcgggaggctgaggcaggagaatagcttgaacctgagaggcggaggttgcagtgagccgagattgcaccattgcactccagcccagggaacagtgcaagactccgtctaaaaaaaaaaaaaaaaaaaaaaaaacagatacaaagtacactgtgtgctccactgcactgcaaaccagtttctggtctatctattcacctttttcgtggttgtcaaatgtgaagttaattcatcatgaatagacatatattttgttgttgtggatttttttttttcaggtaatggtcatatattttctctgccagtccacatgcctttcctcacactcccttagcctcaattcatatgttcttccaaataactaaaggttgagaattagggaacaagaggtatcgattttaaagctacaaaaacttaggggcactcagtgctaacggcaagctcagctataaatctgacagccattttttggccttccacaaagaactgtccctttttagtcaacaaggggacatgagtacctatcttggtgtgttagtccattttgtgtcactataaagtaatacctgaggctgcgtaatttataagaaaagaggtttaactggctcacagtagactgtataagcatggtgccagcatctgctcagcttctggtgagacctcaggaagcttccaatcataatggaaggcaaagcagaagccagcacatgacatggcaagggcaggagcaaaagaggcaagaaggtgccacattcttttcaacaaccagatctcccatgaactaccagagaactcacgcatcaccaaggggatggcactaaaccattcatgagggatcgctcccatgatccaacctctcccaccaggacccacctccaacattgaggatcacatttccacataacatttggaggggacaaacatccaaaccaaatcacttgggaacagcactgtggggtatattagattatattgtttttcaagcaatggaacacaactccaaaatatgttatggaagttttccaagaagatttgcacaataaaagctacagcaccaggcatgttcactccatgtctgtcccatggcagtggctagatatgatatactttaggtaagagtacgagaacatggagcaactaccttgtctagatgtggaggccaggggggtgagcatcggaggaatcacattcaaactgccaggtgttcctgccacacacagtaacagggccaaaagtcagaaacagacagacatcactatccttaaacacctgatggcctctccaacttccagatgcacacaataaaataccctaattcctgttggccctgttccttcatgagtccaaactctggcctccccaggaccactccctgagctaaaaccaatttggtttcagctaataatatacaatggtaggacaaacccaaaagtatgaactatcacaccatggcatggggtgtacttcttggccatcaagaatttagagatgtggctgggcaccgtggctcatgcatataattccagcactttgagaggctgaggcaggcagatcacttgaggtcaggagttcgaaaccagtctggccaacatggtgaaaccccgtctctactaaaaatacaaaaattagctgggcgtggtggtgagcacctgtaatcccagctactcaggaggctgaggcaggagaatcactcgaacccgggaggcggagtttgcagtaagctgagatcgcaccatagcactcagcctgagcaacagagtgagactccatctcaaaaaaaaaaaagaatttagaggtggctgggcacaatggctcatgcctgtaattccagcactttgggaggccgaggtgggcagattacctgggcccaggagtttgagaccagcctgggcaacatggcaaaacctcatctcaacaaaaaatacaaaaattggccagtcgtggtggttcacccctgtaatcccagcactttgggaggctgaggcgggcagatcacaaggtaaggagatcgagaccatcccggctaacatggtgaaaccccatcccggctaacatggtgaaaccccatctcgactaaaagtacaaaaaattagccaggcatggtggcaggcacctgtggtcccagctactcgggaggctgaggaggcagaagaatggcgtgaacccgggaggcagagcttgcagtgagccgaggttgcgccactgcaccctagcctgggctccatctcaaaaaaaaaaaaaattagccaggtatggtggcgtatgcctgtagtcccagctacttgggaggctgaggcagaaggatggcttgagcccaggaagctgaagctgcaatgagctgagatcacgccactgtactccagcctgggtgacagagggagaccctgtctcaaaaaaaaaataaaaaagaatttagaggtatttactgggtatctcctctattaaaacactgtatttagacgttacaaaaaaggaaaagtaaactccctgcccttgagcaccgtacaccaaatatggatgatactgggtgatacactggctgtcaggctcagtgagaaggaaaactgaatgagaatcagaccaaatgtcaccagattctggtggcgacatgcaagcacagtttcacggttttaaatcctccagctctttctcctccccagagtgtccggtgatgccccaccaacttcgtgcagcacatattcttcctgttaacatcccattctcaaaccacccctctctgctcttcttgctaaaaatatctctcatttgagtaatccttttttcttctcgcactttaccatctgttaagtcaacagagccaggactttagcatcaggaagcccaagtttgagccctactttaaatctttcactcattcagtcaacaatccctgaaagcctattttgctctaggctttgccctagatgtctaacacttaattgtatgggccagtcatttaccctctccaggccctagtttcctccttaaagaaaaaagtaaaaaacattgcctaactaacttcctatgatcacaagcttatcacatagattaaacgatgtaactgagaatgtcttacaaactaaagagagaaacagattttattagtctaccaccaccatcttccaggtgtatagcatacatgttttcaaaatacattcacataaatgacctgattggattctcacaatcaaattattacttaggccaaatggccaaatatgattattatttttcttctacagattaaaaaaaaagaaaaattgaggcaccaagaatggaagtgacttcctgaagcaactaagactagaattcaagtctctcaattctccctccaatgctatttttactactcttaagttgatcatgctaaagaggttttagtgacaagcacaattatttagcctaggtcaaagcaaaccttccattagcaagcacgacttctagccctgtgctctttcctctacaccttgagatacctatcaggcaataatgtgaccgtttcaacagcgagcaaggggaagcaagcccttacccgtcaggaacacgcaaaccatggtatatttgaaattcttctaacagaggtaggcatggagtcacattaatagtaaccaaggcaggtaagaaaagaagactgtcacaccaggtcaattgatgctgagactgtggccaacaatgacaccggcaacaaactaccaagacatagcgatttctggggccacagccacagaggagtcaagctaaaaccctgaggactttgagatccacgaacaggtacagtagtaggaaggatggtgtcaacttcaccatgctcaggaagacctgtggtcaagctccaacggctaactgttaaggttcagtgagaacatttttaaaatttcaccttggtgctcgaactgctcacaaccttaaattgtatgttacctttctaaatagaagccagcccttattcaaaatattctctcaatagtcatattatcaaagaaagagcatgaccagacggatcatttgctattccagctttcctcacagaggcatgtcccaagcaggtataactgactcacgctgccgtaatttgaagcatcaatgccagaagaacttggctgcttctgcttgcgtcaaattccttacttctacacatgatcactcctgaaaattcattagaaggccaaacgttctaatatttgaacaatatatcttcatgttctatatctacctcctgagaactgtgtgtatatatattatttatatatatatatatatatatatctgcataaaatccctaattaggattttttcaggtacctgccaacctcaagtgtgagccccagatcacaccctttccataaggcttagcacccctcctgtgaaacctctgcaggagggaggtctacaggctgggcagctgtcaatctcttaccctccaatgtaggctggaggctgtatagcaggaacaggtaaccttaggtgcctccacctcccatgacctcaacagaaagtgagacccccattaactcagaccaaataaagggctaacactctggatggaaacactgaatgaatgctctgctcaaccactcaaggtttcctgatgctaacgtggctcagggcttgagtctataggacttctcagccctgcaggagggcaggggtacgatacttagtcatcacaactaccctggcaacaggagctagcagatagtgccaccacacagtgacaaaaatcctcggttattgtaatacagtttggtatcagtgtaaactatacaaatgcacagactgtatgaaagttgatcatgtacccggtgaggtacatctatacaggctctgggctgcaaaacccaacttacattacaacacatttcacggccctatgcaatgctgcctgatgctggtgcaaaattcttactgctggctgaagtccacccatctccctaaagtgtcccatggaaagtgactatatggtgggcccacactgaaactactgttatctaagggggacaaataaaaatcaagtctgaactttctgagcagactaccaattcccaacatttttcaacactgttgtcagcacaaataaaaatgaggccaggcacggtggctcacacctgtaatcccagcactttgggaggccaaggcaggtggatcgcttgaggccagaggttcgagtccagactggcctacatggtgaaatcccatttctactaaaaatacaaaaaataaaataaaataaataaataaaaatacaaaaaaaaaaagaaaaaaatgaaccatgtttttctttctcattttaggatattatgaatctctctctcttcattttcaagaccgcagccttatacagcaaggcatatgaaataacagaaactctttggcatttttagtttcctctggatatgcttgctcttgcatttatttgaagacttaaaatttgaatacttatgtgaatagttagtatttcctattcacaagtgctaaagcgacacatattcttagggacctattactcccaagaataaaagatgaatttgggctgggcgcagtggctcacgcctgtaaccccagcagtttgggaggctgaggcgggcggatcacgaggtcaggagatcgagaccatcctggctaacacagtgaaaccccgtctctattaaaaatacaaaaaattagccaggcacggtggcgggcgcctgtagtcccagctactcgagaggctgaggcaggagaatggcgtgaactcgggaggcggagcttgcagtgagccgagatcgcgccgctgcactccagcctgggtgacagagcgagactccgtctcaaaaaaaaaaaaaaaaaagatgaatttgcatcacagcccaagttagcaagcttcccagaacagcccaggtctaactctccatggttccaaaataaaatctcagccctcagcctattaaagccacataaagtcatctaattaatgacacagtgcaacattaggtagcactgtagttattaccatcagtaaatattattggttcttttttttattttttgagatggagccttgatctgtcgcctaggctggagtgcaatggtgcgatctcagctcactgcaacctccactttccgggttcaagcaattctcctgattcagcctccctagtagttgggatcacaggtgcccaccaccatgcccagctaatttttgtatttttagtagagacggggtttcaccatgttggccaggctggtctcaaactcctgacctcaggtgatccacctgcctcggcctcccaaagtgctgggattataggtgtgagccaccgggcccggcccagttcttgttattcatagtagttgtgttctgtaaaatctctgtgaacattgaattagtggatattgaaccagtgttcctaggggaaatgagagtgagattccttccggcttctggtcacatttttgcaaactgatcaatacacaaccttgttttacgtatgtttctgtttaaagacaccttatttaatacctattgttgattcattaatgttgaactcaaggccaacagcaccgtaactcaagcctgaatgaagctcatctaacatgtatattttctccatgaggctcatcacagccttcttggctgaggaacattagacagcattttagcaccatacttacgggccactgtaaatagcaaaatccccaataaaaagcacaaaaatgggcagggtgcagtggctcacacctgtaatcccagcactttgggaggccgaggcaggcagatcacgaggtcaggagttcaagaccagcttggccaacatggtgaagccccgtatctactaaaaatacaaaaattagccaggtgtggtggtgggtgcctgtaatcccagctactcgggaggctgaggcaggagaatcacttgaaaccggaaggtggaagttgcagtgagctgagatcgcgccactgcactccagcctgggcaacaagagtgaaactctgtctcaaaaaaaaaaaaaaaaaagcacaaaaatatataaaaacatgttactaaatagactgcaaaaagcacacttgtttacagcatgagagctcaaacaagaaggcagggtagtgccttgtctgagctctactgggaacatgtgcattgggaggctcaaatttttccccatactgcacatgtccacaaatgtcgaagaaagtgtcagaggcattgatttggggcttacaaataaattttagtgagtagacaaatttataaacatggaaccacgaaaaatgaggatcgactatatctggctattagacctgaggcatgagacacagaaagtacattctacaaagttttctctctttgcaaaagtgctattattctgtatttcaagaaggtataattgttctggttttagcacctcctacattccttttcctaccttggcagtttgtatctgccaaatcttgcatcaagattttgcaatctagttcttatgatactgggtttttttttgcgggggggtggtttatgtggacagatcctaaatgctacagattagcagcattcactttactcttctattaaacacccacccatagcttcattaactttaggtgagttccctgaaagaagcacaaatgagcctcagttaacatacctcgaagaaatttcttaactcacacacacaaaaaactttctctttcaccaggttctcatagctgcaacagctcatctcacacaagcaataagcagacacattggtatgttaaaatcaccacaccaaaacaagaaggcaataccctgccttcttgtttgagctctcatgctgtaaacaactgtgctttttgcagtctatttagtaacatgtttttatatatttttgtgctttttttttttttgagacggagtttcacaatttcagtgacgttaaaattttcccgtgtattttatttttccttcctgagcttacaacttttagtacttttgttaggtcatgttcaaagttacaaaacaacttttattgttaacctactcattattttactaaggcaaattaaaagctgcacagcaaaactctccaagacagatacctagaagagacacgaaataaactctccctttggatttgttttggcaaccaccagagactggtaacagggctgcctccataaggagttaagaggaatttcccactacagattttttttttttttttttttttttggtacagttgggagccgggagtctctctgttgtccaggctggtctggaactcctggcctcaagcgatcctcttatctcagcctcccaaagttctgggattacataggtgaaacaccgcgcccggcccagaacatttaaaagtgaaagtttttacataattatcatgtctgtaagaagtgttaaaatcttcagataaagtcataattttaaatcagttgggggatagcagtaacaactgtgtttatgtagctctttcaaagcttcaaagaatttataaataacacaaaatactttcaaagcacattattctctgtaattcctgaaactctgtgatgtattggaactaatattaccacccttttacaaaggaaaataagatacaaagtttgagtacgagtaacatttctggtcataaatctagtcagtgacactgataggactagaactcaagtctccagaaataataacccagagctgtttttactacaacattcacagttttggaatgtagtccatagttatttatagcagaattatcttcttaattgtattgtgttttggtcaacataaaaattagtttgcattcacttccaaatggaaagcaaaggcaggctgcccagaagtgtgaaaaaacggtggccggggaaattagcctgggattaaaattttgccaaagttaaacaacgaattgaagggtttacatcatttccaccgtgggggagatgacttttcaggccagatgtaacaggaaatacaagaaaaaattcaaaactgtcttgagtgtaagacaagaaacttctgaatcaagtatttctaaatcctttatttaaattgagagcattgggacttagagataataaataacttgtcccaagatcacaccacagggacagctttactgctccgaccccaaaggtctccttaaactgcccactctactccctcccagtcatgcgcagactcttcattagatgcaagcaggaaacaatgaacagtacaagtccgtggactcagcgagtagagaaagagttaaagtttggtatgctaacatggtatgcaaaactgaccttcaaatcctaataggcaaattaattttttttttgtctttgactatttagaggaaacaactgccagactccttctgagtagaggtaggcttgggtatagaacaagatattaaaactccacaaactgggagacagtgcctttcaaagagagggcaaccagctgttgataaaacccagcagaaccgcctccacttccccacacccctaccctcccgcgccaggctgctggttcttattaatcacagagaagggactacaactagcaaacatacagcaccgacgatcaaagtgaaaccgattttttaatcatctaacttaaacagacgaacacatgccagcaacgtacataaatacgaatagccccagcaagcactgtcttcataacctaagacagttaaatgtctcagggtgatgaatcaaaggagacttcaagcaaaacaaaaagcgaacagccctgtgctcttccgcgaggcctgcactgggtgcagggagagtgtgcagtcctgttttggggaccgggcaggaagcacaggaagagtacggtgccccttcccgcagtccacatcacagccctccctgaggccggcggggaccgcggggtgccaggcgcgggcctcctcgcccgccccgagcctccgactcccaggacgtcctccgggagcctaggcgcttccgctcccaccggcgcctcccgagcggcccggcaaggacccgccacctcctccctcccgcagggcatcccggttctgctccgacagcccaccccaaggcccctctcaggccagccctcgcccagcccgggtcccgccccgccgaccgggtcaaccgcactcaccgcccggcggctctgggcgcgcccgcctggggccggcctggccctgcgggggacccaggggcggggacgggacctgggcacgcggggcgcaccccgagggcgcgcagacgcacaggcgggctcgcgcccgagcccccgcacgggcccccgccaaacacgcacacgcacacgcacgcgcggaccgggccggcggacgggagcgcgggagcgcgaggaatccctggaatgaggcaccggccaacctgagccgggctccgccaggccagccaggccacgccctcggtcacgcccctcacggagcaggtgggggctgagccaggtgagccgggagggagataggggcgaggcctcccgcggcagggagaggccgctttccctcccccgccagctgcgcgcccggtgccagctcgcacctcccgggccgatgccggcgcgctggggcagtgaggtttgtcggggcgggcgctcccgagaggcgccagcgggcagggcgagtggacatggcgcacactgctgtggacacggcatctcgcacgcccccgcccccgaggccccgccaggggacacagcgccgtgcaaatgtacaaacacaaacgcacatttcgtgcgcgcccaggtgcccgccgcgctccccacgcgcgcacagtaggtccctgctcccgggggacagcgcacgggacgccgacgttcacagtccaaccagacccgtcccgcggacctgctgcccttcccgccacacacaccccgccaagcgcccggagttcagccgaacctgcggcacccacgccgccctccgcttcccccggctcgcgagcagccggataagggcgcaccacccgcccgcgccggttcgccgtccacacccgctcacccccggaacgcggcgcaccttccgtcccccgcctcccgggccccgtcgccccctctcggcacccgcatgcccgagccgcgctccccgacggccgacggccacgcacctgaagggacaggtcacaccggctgcgggaggggctgctcggcgccactgcgctcagaacggccgcggcggtcccgggcgctccgacgccgctgggtttcctcccattacagcatgttgcactccagcgctgcacttcacactcgcacacgcgcacacgcacacgcgcacaactccaggcgctcggcggcgtccttcccccgcctcgcccggaggaggaagtcctagtaaatcaaaacaggctgggagggagggagatcggagtggaaagagtccccttcagccgctcacacaccagtgtttgctgtgtttggcaaactcctggcgtccacaacccggactgctctgaaatgtgcccggggaggggcagggaggaggaggtaaaacgtttctaattggcgcaggttcttatattacagcagcagggcagacatgtgaccacgaaaagaaaaggcctgtctttaattttttcctgtctttctctggggatttggtggtggggggccgggggatagaggcctgatacccgccccccgccatccccagcaacccttgccctgttgttttcttgtactgccacaattaagaaaacatttgcttaacatatccagcggctaacttcataaaataaatagagactggacttcctctggtttgctttaaaaggcttcatgttgcttgccttctggctgttctcaaacctcagtcattattaggagcccctaccgtaagggctttccctgggagagggctctgctgaaagggaatgataacaatgaaaacaaataccagcttacattcgtgctggaaaaaaaaaatgctttgcagttttcaaactgttttcccatctgttgcctcatctgatcatatcaaggaacagcacggtgtctcactggatcttagcccctgttggatatgcaaagacaggtatgcgtagttccatgtttcagtgagattaaatggtttacctaaagcaggtggaggtgttgcccgaaacttggggccccttgtgaaatgtactctcctccagtccatacagggcctctggagatgggacaacccaacttacaagtcaacctaggaataggtcccctggctttcctgattcctggataaatattcacagattaaagctcggaaggttcccagtcttcccaaaggtactcttacatagactccgttttagtccatcagtagtctcggactaggaaaagagaaatcctgagaaagactgtaaataggagattcatcctgccaaactcagacagggaatgaggaaggaatgaggactgcctgggcagattccaggaaatatggtaagacagaaaaagggttttagattcagacagaatttgaatccaaactccgcctctatttgttataggatttggggcaagttatcaaacctcagttttctcatccgtaaaacagagataatgcttcttcgaagagccggtgtggggttacaggcttcgcagagacgtttaatgaatactcacatcttccttctcttctgacttaaatccagtccaggtgggcaccttatgaacagaggaaaatgaaatgcccagacaacgcaaatgaataatgataacaataatagtgcaactgcatatttataaaaatggcccaaggtttacaaagtgttcccacgtattattatctcatttgatctttatgacaacattgccatttgtttgctgctaaatgatttccattttgggtcagtgcggaggtcctaaagctgcctctttaatttccatcactgcttggagcgaaccttactctgcaaataaatcatggggacagaagaccttttctcatggatgtgaccagtcttcgacctttgcaaggattaatctcactctttgccttacatcagcattagcgtgacttagctctggcaacatctaagcctggtcgttttagtctggctcttttagttgtgcaaaggagagacacactcaagttactgtaagaaaaaggggggttgttgtaaaggtctagggggactggaagtggaacgtggcagacacatagaatattatacagtaacctaaattaaaatgacttacagtgacctcaacaatacagatgcatcttgacaatgttaactgaaaaaattaagtcccaaaagattacatacagcataatactctatttgtaatgttaaaaataaaattaaaaataattttagtggtacatatatctgcaataaaatgatataaaaaataagtcagggccagcctggccaacatggcaaagcccatctctagtaaaaatacaaaaaaaaaatggtcaggcgtggtggctcacacctgtaatcccagcactttgggaggccaaggtgggcgaatcacgaggtcaggagttcaagtccaggctggccaacatggtgaaaccccgtctctactaaaaatacaaaaattagccagatgtggtggcacgctgctataatcccagctactcagcaggctgagtcaggagaattgtttgaacccgggaggctgcagtgagccgagatcatgccattgcagtccagtctgggtgacagagtgagactccgtctcaaaacaaaaaattagctggggatggtggctcacacctgtagtcccagctactcaggaggctgaagcaggagaatcacttgaacccgggaggcagaggttgcagtgagttgagatgacaccactgtactccagcctaggcgacagagctgagtctcaaaaataaaataaaataaaaacaaaataaaataaaaattgaggggatgatgatgccaggattacctgggtgggggtgggggcaggcatgggattggatgggagaaaaccatttggttaaacattgttgtctaggtcctagcttggtaggttcacaggttctctattaaaataactacctaggccaggcgcagtggcttatgcctgtattcccagcactttggtaggccaaggcgggtgcattgctttagctcaggagtttgagaccagcctgggcaacaccgcgaaaccccatctctacaaaaaatccaaaaattagctgggcgtggtggcacatgcctgtaagtcccagctacttgggaggctgacatggtaggatcacctgagtccaggaagttgaggctacagtgatctgtgttgataccactacattccagcctgggtgacagagtgagaccctgtctcaaaaaaaaaaaaaaacaaaaacaaaaaaaaaacttaagtgatggttttacagtagtgtgaatgtacttaatgccatactgaactaaacacttcaaaatggttaaagtggtacattttgtattatgtatattttaccacaagtttaaaaaatgtataaggaacataactgggcaaatcaaaaagaaaacaatactgcttaagtagctaacaaataaaggtaggctgtacatagaccactgatgagaatatatttcaacccaaggattttataaatgcgccagaagtgtattttaaaaacaaaataatcaagggggtgactgagtggaggtagcaaagacacaagattggcccagagttgatcgttgttgaagctgaggatgggtacagaggagggtgttgaggtagcccctcagtgggggatgggggggggtgacactactctatctgctcttacatgtttggattgtttcatagcaaaagattttattttattttattttatttttatatttttatttatttatttatttattttttatttttgagatggagtctcactcttgcccaggctggagtgcagtggcatgatctcggctcactgcaacctccacctcccaggttcaagcgattctcctgcctcagcctcctgagtagctgggatcacaggcatgtgccaccatgcctggctaattttgtatttttagtagagatggggttttaccatgttacccaggctagtctcaaactcctgacctcaggtgatcaacctgcctcgggctcccaaagtgctgggattacaggcatgagccaccgcacctggcctattttttatttttatttttatttttattttgagacagagtctcgctctctcacccaggctggagtgcagtggcataatctcagctcactgcaacctccacctcctgggttcaagcaattctcctgcctcagcctcctgagtagctaaggtagcaggcgcctgccaccacgcccagctaagttttgtatttttagtagagacggggtttcgccatgttgaccaagttggtctcgaactcctgacctcaagtgatcctcagtcacctctgggtgattctccacttctgcctcccaatgtgctgggattacaggcatgagccaccgcacccagccctgtttcatagtaaaacattgtaaaaaggaaaatgaaaaaaaagtgcagagtaggaaggacgcgttgtggctgtgttgtgctctcacccatcgactgcacagcttctcagtttccctttcgctctgtttctttgtgcgtcctccccaatctagttctttctcatctctctgccaaggactttcctcacagctttggctcccttattgctatctctattaccccttttagcttttgcccccataggtaactgactccttccgtatcttcatagttcagattgctcagagaatctgattcttctctttcttcttcctgttcttcttcctcttcctctttttcctcttcttcctcttcctcttacacttcctcctcctgcccctcctccccctcctcttctcctctctcctcttctccttcctcttctcctccctccttgttctcttccctcttttgctccctcctccttctcctcctccttctcctccctctcctccttctccttctcctccccctcctccttctccttttcttcctccctcttctcctccttctccttcttctcctcctcctttttttcttctcctcctcctcctttttttcttctcctcctcctccttttttttcttcttctcctcctcctcttcctcctccttctttttcttcttcctcttcttcttcttcttcttctttcctcctcctcctcctcctcctcctcctccttcttcttcttctcattctgtcacccaggctggagtgaagtggtacaatctcagctcactgcagccttaacctcctaggctcaggtgattctcccacctcagcctcctgagtagctgggactacaggcatataccaccatgcccggctaactttttgtatttttagtagcgatggggtttcagtgagttgcacaggctggtcttgaactcctgggctcaagcaatcatcccacctcagcttcttaaagtgctgggactacaggcgtaagccaccatgcccagcctgactcttccctttccactaatccatagaaatgattgccggctgatctccctggaagccacacagccatgagggtcagtgaagtcaagcacagtccagtgatgagaaacatggtccatgtgggcgtggggtggaatggctttaagatggccacaaccaatgacacgtgtggaaggggctaaggagttcagttcatcagttaacaatttcttaaggctgttcaatgggtgagtgttataaaaaaagttttcccttccacgccaattgccaataagtagtttgtattccagtttgtcctcccatgtcatacttctaaggggcaaataaggggaatatcaacggctgccaatctgaattgctcgtagtacatatagacatctactgttcccctcattgcactaacctggctgtggaaaatgtgtttttctagtctatatccctttgcttatgatgtactttcatgaatctctcctgttttcttctcttcactccgacttgttccacaaaaagcactgaggaatctgaagatgtgggttctagttcacactcctctctaggtgacaaagtgagtcattctatacctctgcatattccaagtcttcccctctgtggggagctgagaccagatcaagttaggcaaacaggtttccttttgagcacctgctctgcctggagccctcttttgagaagggctctggcagcacagttgaggcttagtgacaaagtgtcgagattgattattaatgtatgctatgggcagggaataaaaatgagtgaacctggccgggtgcagtggctcatgcctgtaatcccggcactttgggaggctgaggtgggtggatcacttgaggtcaggagtttgagaccagcctgggccaacatggtgaaaccccgtctctactaaaagtacaaaaattagccaggtattgtggaatgtgcctgtaatcccagctacttgggaggctgaggcaggagaattgcttgaacctgggaggtggagtttgcagtgagttgagatcgcgctgctgcactccagcctggcagcctgggcgactctgtctcaaaaaaaaaaaaaaaaaagaaaaaagaaaagaaaagaatgagtgaagagtgaaccagatgtttgccatttttggtggaggagcgctaaaaatcccatctagtaataacttctttcttttctcatagtgtgagaacaggtgcatttctacttttctgggaaccaaagaactcagtggaaaaaccaaatgatcttatttcagggagagaggaaagaataagaaataatctaaaataataataataactaatgtttgaggagcactcactatgtttcaggcaccactctaagtgctttacaacaagtaccgaattttggcctcataacaattctattgtaaggtaggaactgtaggcatcctccttatgcacacaaagaaactgaaacatgcagacattaaattacttgtccaaggtcttaaagacagtaagaatgcaactagaattaaaccctggtggtccaattccggagtccacctgcttatgcccctcactcctcaggattgcctgcagactaattgcatccagcatcccctgagagcctgctagaaatgcaggcttgcaggacccacccagacctgctgaattggatctgcatttcagcaagcttcccaagtgactcatattcacagtgcactgagaagcaactgcttgcttacagatgttactattattattattatttcagacagggtcttgctctgttgcccagactgtggtgtagtggtgcaatctctgctcactgcagcctccaccgccagggcttcagtgatcctcacacctcagcctcctgaggagctgagactacaagcatgtgccaccacagtaggctaatttttgtatttttttctagagacaaagttttgccacgttgcccaggctggtctcaaacttctggactcaagtgatcctcccgccttggcctcccaaagtgctggattacagacataagccactgtacctggcctatttctttttttttctaatttaattttttttttttttttgagacagagtctagctctgttgcccaggctggagtgcaatggcgcgatctcggctcacagcaacctccgcctcccgggttcaagtgattctcctgcctcagcctcctgagtagctgggattacaggcatgcacctccacacctggctaatttttctgtttttagtagagacaagatttctccatgttggtcaggctggtctcaaactcccaacctcaggtgatccgcccaccttgacctcccaaagcgctgggattacaggcgtgagccaccgtgcccagcccctggcctatttcttataatcacatgtgaatctgcaactatttcaaaaaaaaagaaagtgaaattttatgtaggttttatttttcctgcttttgttgttgaggaaacagagctttgaagaagctaaataagcagcccacttggtaattcaacctatgtattgaggccccacctgctgtgtgtaagacactgctttccgcactgaatttccagcagtgaacaaatcttgccctcgttgagctatcattctagtgggtactcagttcaaacccacatctgggtgccaagtcctctactgctcagaaatatggtcacagattcagagagtagtaaataataaagctacacaaggttcaaatatttgcaaaatgtctgtacaagtatatatgaaagcattaacagtgctaggtacacagtaagcactcaataaaaattaatcctcttcctttctttcttgcagttgcctcagagcctggaaggaagctcatctccactgtgacccaactggatggggtccacgatgggcccattgtgagtagctgtgacctgagcttcatgcccctctggcgattagtcgaagagctgtgattgagggcgatgttccaaggtctggagatggacccttttaaacctgacagggaggccaggcacggtaactcacgcctgaaatcccagcactttgggaggccgaggcgggcggatcacctgaggtcgggagttcgagaccagcctggccaacatagtgaaaccccgtcgccactaaaaatacaaaaatagccaggtgtgatggcaggtgcctgtgatcccagctacttgagaggctgaggcaggagaatcgcttgaacccgggaggcgaaggttgcagtgagccgagatcgcgccattgcactccagcctgggagacaagagcaagactctgtctcaaaaaaaaaaaaaaatacaaaaacttgccagggagtcggtgatgtgtgttcctgtgaatgtcagttcttttcacagcatggttctgagaaagtgcccttaagcaagaccaaatttatggccagaaggattgctcagacccagacatctgagtggcatctaacactattctaaagattgactttgtcctcatgcaaggaattttcctttaaatactataagaacaattcaacatgcaatatattcttgctgtctttcctataaataaatttcactgggctgggacgggaaataaaagcctttttcaacacactaaaaaattgttgcagatgctggattcaaggccagtcagaatttggccgctgctgtcagacagagagtggtttgaatgaggaagcttaccgagaatgaatgtgtgttttcttctgtaggtggaatacaacaacaccccagagtgaaattcttccaactgggattgccctgttaccctgtctttttctttctttctttctttctttcttttctttctttcatttttttttttttttttttttttttttttttttttttatgagacagagtctcactccgttgcccaggctggagtccagtggtgccatctcggctcactgcaacctccacctcctggttcaagcgattctcctgcctcagcctccaaagtagctgggattacaggtgcatgccaccacacccggctaatttttgtatttttagtagagacagagtttcaccatgttgcccaaactggtctcgaactactgactgcaaggaaggaaggaaggaaggagggagggaaggagggaaggaaggagaaaggaaggacaaggttattgggtgccaagtgtgtgcagtgttgaacattctcatttaatgcagtgtgatcctatgaagaagattgtcccattatgcagatgagaaaacaggggctcagagagggtaggacatttgcacgggcagtgcaacactaggatgcaaaccagctggtcctacttctcattgaacaatctttcaataataccactaaattcacccagaaaagacctttggagaatctctaaataaataattgcatttggcagggcgcagtggctcaagcctataatcccagcactttggggcacgatggctcaagtttgtaatcccagcactttgagatgccgatgtgggtggatcatctgagatcaggagttcaagaccagcctgaccaacatggcaaaaccccatctctactaaaaatacaaaaattagccaggtgtggtggcacacacctgtattcccagctgctctggaggctgaggcagagaatagcttgaacctgggaggcaggatgcagtgagccaagatcacaccactgcactccagcctgggcgacagagcaatacttcatctcaaaaaaaaaaaaaaaagaaaaagaaaaaagaaattggctgggcgcggtggctcacgcctgtaatcccaacattttgggaggccaaggcaggtggatcacgaggtcaggagttcaagaccagcctggccagcatagtgaaaccccatctgtactaaaaatacaaaaaattagccgggcgtggcggtgggcgcctgtaatcccagctacttgggaggctgaggcaagagaatcacttgaacctgggaggcggaggttgcagtgagctgagatcacgccattgcactccagcctgggcgacagtgtgagactacatctcaaaaagaaaaaga

SEQ ID NO: 429 - DNA, 818694 bp, Homo sapiens
tttctcagaatcctccctttcaaatgaggctgaattttgtgattttaaaaatttaagaccttatgatttctgcaagcgggcaggaaagtcatgagacttgctggaattttcatctttgtggcaggggaaaaagctaaccccactgagttagttttaagagaatagttatgttttgattatattttacaagtcacactagttcaatgcaataaatatacagattttctgctacacagttggtggaaacctttcagaacctgcgggtacatgtcttaagaggaaaagagcattgcaagctcaaatttttaaaataaaaaattttacaattcctatattagtttcattcaccaatcactacactaagtcccgaagcaaataaaatgtatatattcaaaatttatgaaggaaataaattaaaaatttgaatgacaaaaaattcagtcttttggccaggtgcggtggctcatgcctataatcccagcactttgggaggctgaggcaggcggatcacttgaggtcaggagtttgagaccagcctggccaacattgtgaaaccccatctctactaaaaatacaaaaattcgctgggcatggtgacgcacacctgtaatcccagctactctggaggctgaggctggagactcgcttgaacccggaggcagaggttgcagtgagccgagatcacgccaccgcattccagcctgggtgacagagtgagactccatctcaaaaaaaaaattcagtctttctaagacagggaaatatgcagtgtactttcagtagaatgattatcaaaccacaaaggacttaaaaaacaacaacaaccctttagccatggttattaagatgaaataattactgaaattcttatttaaatttcctatatcagctatccttctagatatgaggcatccaagtgaagaatttcaattttaaaggaattattattattgttattattatttttagagacacggtcttcctttatcacccaggctggactgcagtggtgctatcatagcttactataacctcaaactcctgggctcaagtgatcctcctgctgtagcctccacagtagctgagactacaggcgtgtgccaccatgtctggctatttaaaaacattttttttatagagatggggtcttgctatgttgcccaggctagtctcaaactcctggcctgaagtgatcctcttgctttggcctcccaaagtgctgggattcaaggcatgagtcaccatgcctggctaggaatttttatttgttttttgagatagggtctcactctgttgcctaggctggagtacagtggcgggatctctgctcactgcagcctccacctctctggctcaagcaatccttccacttcagccccccaagcagctgggactactggcaggcaccaccacacccagataatttttgtattttttgtagagatgggatttcgccatgttgcccaggctggtcttgaactcctgagctctagtgatccacccgccttgacctcccagagtgctagaattatatttttctgaaattattttaataatcccataaattataaattataatctcttcagaaatcatgtgaatcaattaagaaggaatatgaccctaagataaggtttaagagtaaaaatagtagttagaattaagttcagttgcaagtgagtaaaactaaaaatagcaaataatggattaaacacacaaggtttcattctctataagtttggaaattggcattttaggtgggatttcaggtgggatggaggttccacaaagtcatcatggacataaactccttctggttggtcactacaccatacctagggtggtcctcatcctccggctgaagatggttgctagattcaaccatcacatctatgttccaggtagtaggagggaagaaagggaaaagaagaggccagtctctctctttgaagaaaatttcacagttacttttctcatttgccagaatattggctgcaaaggaagacaggaattatagtcttttatctgtgtatagtttaatattggataaatttggggttcttttactaagatggaaggagaaaatggatgatgaggcaagcagctaggagtctctggcatacacacttaaatatatttcttttaataagatggttaggtctgacattaattactaataagtttgaattattggtaaagatatttaattgtactgtagattcagtgttctttaaatgcttgctttctctatgtagagaacacttctgtcacttgcaaccaaagaaagactaactcatggtcagtaatcagggatttgttctattatttaagctctctgtttcactaagagaagcatctcagcaaattctaacacaaatttgtaaatatattcattcaatcattcatacaataaacatactgaatgcctaggtactaggaaaaaaaaacccataatttttgaattcaaagtgttcagtctggtagaaaaagatggtgataaaaaattttaaatgtatgaaagtgttataggtgcagtaaaaatatatgtatctggtgttgtggggtacagtagagcaagatatcaattctacaaaaatgagattaaagggtatgcatccaaagtaaggcatacattgatggtggaattcaattaaaaatgattacataatttaaaatacatcaaaaggtacagagaataacacaatggctatcaatttatgcaccatctgcctatgaaacaagatattttgaatataattacaagatacaattctgattttcatatgcagtttgaaattattagcagtttgaaattattagtaatgatgtatgtaggtgtgtcaaaaactaaaaatcttccacgaagaggttgttattgtcaccgtcaccaaatcagagaattaaatagtaagaattttcctgaaattgaaagtgttagacaaagttttaggaatattttaatatattctaaagcaatggcatttgtcattttataattctcatttacttttgtattagagagtctcttagaattagacataatcttttttcaaatttgcagcttattttttatgtggcaaagggaaaaggactaaaaaaatgtcttggagggaggggtagggtgtggtggagagggcgtgaacttcccttgactcagaagaggaaagtggtaattttcctccctttaccatgaaagtatttgtaatttttgaagtagctttttctacaaaacatatgtatttaaggaatatttcttatatattcaaaacctgcaatttagtaggcctatggtaagtacttcaaaggaacttggagtttactgccaaagctctgtttggaaacgcttgtgcagggaaagcatcaggaaggaagataccacatctgtagaaaagcagcctccctctttgtatagtttctttacattattaaaaaattaacataattcagactaatatggctagctgggctgacaaggaaagactccctacctttacaaaaatatacaaatgtgggataataactttaaaaattgaaaaaatgtattttgtcaagcttgaaagcaagaaagggaaatcagctaggtatggtggctgcaatcctagcactttgggaggctgaggcagaaggctcacttgagcccagaagtttaagaccagcctgggcaacatagagatgtcccatttctatcaaaaataaaaaaaaaaaatccaggcatggcagcgttcacctgaggtcccagctactcgggaggctgaggtgaaaggatcacttgagcccaggggattgaagctgcagtgagctgtgatcatgccacttccactgtggcctgggcgacacagtaaaaccctgtctcaaagaaattttttttttagccatcgaaacaacaacaataacaaaaaaaaaaaaaaagaaagaaagaaaaaagaaaaggaaatcactagcttttagaaaaaggaaaacaaaaaaccagagcattacaggaagctgaagtcaagtatatactgaagcccagtggctcacatgagtactggaacttgatacatgttgtgagactcaaagacttagaaggaatagattattgacaagtgcaaaaacatggatgaatcctgaaatgattatactgagtaaaaaaagcaacacaaaaaaagaatacatactatatgattccatttatagaaaattctagaaaatgcaaacaaatctctagcaacatcagtgagtgcctgaggacatggaggggtatgagtcagagtaggagggagagattacaaaggggcatgatggatatgtttactcttgattgtggtgatggtttcacagttgcgtacatatgtcaaaacttgtcaaattgtacactttaaatatgaatagcttattgtatgtctgttatatctcatgaagatgttaaaaaggacaaacaaaatcaacatccaagcaagttcaacagatccttcttctcacttatatgtatgcaatttatttgctgaagaaacttggtggtatgtcctatagagtttcccacattctggattttattgattgcaaaaaggaatccttatcttttttttttttgagacaggtattgctttgtcacccccttatggctcactgcagccttgacctcccaggttcaagcggtcttcctacctcaacctcccaagtagctgggaccacaggtgcgtgccatcacccctggctaatttttaaattttttgtagagatggggtctagctatgtttcccaggctggtctcaaactcctgggctcaagcaatcctcctgcctcggtctcccaaaacgctgggattacaggcctgagccaccatgcctggtcaagaattcttatcttttagagctttatatgatgaagtatttatgggtgatatccatgtgaggggtggggaaggagattggccacatattgataattgttcaagctgaatgactgactcatgaaggctcattatactcttctctctactttttatgtgcttaaacattttttataagaaaaagttgaaacaagtcctggggcctatcttagaggtactgaatttcttgggggttgagcatagagatatgcatttttataaactcccaaggtgattttgttatacactacagaggatcactgccccacataaaagaaaaggactcctatggtgagatgaatttcagacacctaccataatgtatgggaaaaaccatttttggtaggtgtcctttacattaagtatcaaattctaaaagtagtagaggctgggcatggtggctcatgcctgtaatctcagcactttgggaggccacggtgggcagatcacttgaggtcaggagtttgagaccagcctggccaacacggtgaaaccccgtctgtactaaaaatacaaaaattagccaggtgtggtggtgggcacctataatcccagctacttgggaggctgaggcaggagagtcacttgaacccgggaggtggaggttgcagtgagccaagatcgcaccactgcactccagcctgggtgacagagtgagaccctgtctcaaaaaataaaaaatataaaaaataaaagaaataaaagtagtaggctagctattcttcctcaagagacatttagggccaggcgcagtggctcatgcctttaatccctcccagcactttgggaggctgaggcgggtggatcacctgaggtcaggagttcgagaccagactggccaatgtggcgaaacgctgtctctactaaaaaaatacaaaaattagctgggcatggtggtgcgtgcctgtaatcccagctactccggaggctaaggcaggggaattgcttgaacccgggaggcggaggttgcagtcagccgagattgcgccactgcactccagcctgggcagcaagagtgaaactctgtctcaaaaaaataaaataaaacaggcatttagatctctgcctgcctcttctactgctgaggaaattttctgctccctatatacatattttattgtgttcttagtcttaaatgggcgattgcaacacaggtttggtttatcatataagctcattatgacttgtccagattactctgaatttcagccctacataaaaccgtgaaataaaaaaggttttcttctgtatctccagttttacctgttacatctttcgctctctcggtgatttctcccttcctccagtagccagtgcctcttttccaaatcttcctgttagtaaaaaaaaaaaagactaaaaaatcatgtgataaactcatttatataagattagtgattcgagtcatgaagtgctcttcttgggcaaagttgatttaaatagggcacaggatttaagtcaaagtgaaaaaaaaaaaaagtgtaacgatgggctttcaggcatcaggtagcccagtcagggaaggattttttggtgtggtcaaattcctttcaagaccctgtaaaatcttgccagacagcttgttacctttctatcattggaaacgtatccttggaagagtcatataatgcaactaaagttatttgttccatagtatgcatggaaagatttagctttatctgtaagaaatacaaagccaaactcgaaccttcttaaaaagctgtcaaaatcaggccgggcacggtggttcacgcctgtaatcctagcactttgggaggccgaggcgggtggatcacctgaggtcaggagtttgagaccagctcggccaatatggtgaaaccccatctctactaaaaatacaaaaattagctgggcgtggtggtgggcacctgtaatcccagcttctcaggaggctgagacaggacaatcgcttgaacccgggaggcaggggttgtagtgaaccgagattgcgccactgcactccagtctgggcaacagagtgagactgtttaaaaaaaaaaaaaaaagctgtgaaaatttattgtctcagaggaaggggtaggcttcaagctgggtttgagtgcttccatcatgtgtcagcttcatcctcaggctggcttcctcatggtagcaaagtggctgcagtaactattggactcacatctacccatcacactagccagagtaagaaaaagagcacttttcatttcccaacaaacacaagatatggccttccatgtgactggcaccaatttagactcatgtcagtgcctatcagtgaatactgacaggtcaagtgagaatgggattaggctgattatcacaatcactgtccacacctggagcgggagatgggcctaatcagatccttggctgtcttgcaattgcagaggggtggaaatatattctggggaatcaatcaatataatgctcactataaaatcaatatgatattctgtaccattagataccagtttaaactcttacattattgttcaatgtttaacttgtttctaattttttttttcttttttgtggagacagggtattgttatgttgcccaggctaatcttgaacttctgggctcaagcaattctgccttggcctctcaaagtgctgggattacaggcatgaaccactgcacctggtctgtttccaatttttgatattacattttaaactaggagttgcagacataaatgagagaaacaacactgtaagatacaatagagaatgtagagactttggcaaaagagagaatgcatgtcctgcagctgatcgttatcatgtaataatgtaagctcactgttaccaaatcttccactttttaaagagaagcccaaaatgcatgtataatcttctggtttttaactttggatatgtgtttttttaagcaccatgtatgccaaacaaaacatgtttgtgggtttgatttgtacctggggcaccagtttgtcatgttatgaatcatgctggagtattttataacaccatctctcaaagtgagagtttcagtcctttcatggaccagggctgctaggatacgcttaatgcaaatgaagccacagtggaaagagaagtgagcagcacataccacatgaagaatgctttgttattaattttttattccttttagtttctcgactaaaagcctgaagatctgttaataattttttggcatgtgcttagaattgtttttctggtggtaaggatgagtttgcatcagatcaccttaattgtcttttatctaggttctctcatgacttgtctcttatctatgttgtactgtgaggaaaagttcagttttaaagaatgacccctgttgatgagaggtgttacatgtggccatgggacaggatttttcttttccttatagcaagttggcacatgaagatagcatgctccacttaaatagaagaattaactcgcagtggccagtggtgtccactattgctttcaaagacatatggaactgaatttggggaacactaaacttgttttggacttgccattttttttttaaattcttttttagctaagttacctattgaatgcccataattaccacatccattgtccttttttgtcaaaaagcttcactccagttagaagatacctgaaggcagaaactgcggctttgtcaactgttgatttcctcatggcgcgcagtgtaaatttactagtactttatttagtagaggcttagtacttactggttggcagatttattaatagttcctgtacatctcaggaaatcaacagatgatttatgttattctaaccctaactttattaaatataataaaaactttcagcatttattgtcaggcccagggctaggtaggctcctgagatacagaagttaataagggaagcagcccagaaggtaggggaaacaaaaaaatagttacaacactcttgatatgtctcagcatctatagacattaacatcaggaaaagcgggggtgtggggggaaggaatttgtcagggagggccctttggacaaatgtcacgtttctcagagtagcttttaaatatgggtgggaaaatgagggcaggggaattgaagtgggatagaagggagatatttaaactaaagtcattctatggctgcaatcactggacactatattcacttatccatgcaatcacattcattgagtgcttcctatgagttaggcagggtgcacagtgtaagatacaaatgaatgatacaggttcacagcggttgtctagtgggataaaatgctgcacagggcaacctggataagcctgacatgttaggtgccacaaaactacagaacaaagtgctaaggagattcggaaaatttacaggtcatttctggttgcaggatctagaagaaggatgtccacaattcaaggatcagtacaatcttcgtagcgaaaaagcgttggtttattctacctctacctagtttgtacctcaacatcttttaccccaaaggataaaaaggtgcaaatgagggcacattttcttcatataatacgtaatggtgcttacttattgctttcctgttcattccccgcaggtgatttccctcttcagtctcccccgagtctcacagaaggaactaacaagggagcgcttcacaagcacacagacaccttcaaacaggcgcagaagagtacttggtgaaaaagtattctttcaggtgactttccttaagattactgagcattaagaatgaaaatatgtaaaccaggtttacgagcaagaaaataatctctccacattcagagttaatcttccgaactcagcaactgccagtagaacgcaccccggtcagggcgggctcgcgggcgcggtcccacccccaggcccctccgccgcggaggttctccagcgccgcccgtactcccgcctttcgcgcgtccctgctctaacagctctggttctgtcaggacctcactcctccgctcccggcgcaaccgcggccacgcagcgacgtgcacgcgcgtgtgcgccgccgccgcccggcagagtgggcgcctccgacatcaggagcgcgcacgccgcgcagaggggcctggacgagcgcgcttccgacccgccgccaccgcctcctcccctccttctcggcccgccccctccctcgcctcttcctgccaggcggcccttctcccctcccctctcagttccctccgccctcctcgggctccagcggtggcggagcgaacgggaccggcccggcttcagagcgcgaggtggagggtggaacgcgggcgcctgaaggagttgttgtctcggcagcgcccgcggagacgtgaagaggtgaggcgaggacggcctcctagggacacgagggcggcccggcggcccggatccgcgggccgaggctgcctgggtgtgttggcgtcgggctgagcctggggagggtcgagatggggccccagccgaggactgggatgcgggaggaccgcggtaaggagggtagggggcgggttcaggactgtcggccgcctcccggacaccgcagttctcccaggtggccgctcctcgcggatagggcgggcggggtcggcgcccttacctgggggtggggtagtggctttggcggccgcctcctccagctgtgccctcctgacattgctgcctcggcggctgccgcccgctgctacgctgtggctgctgctggattcgcagtcccagccgccctgcgtccggtgggcgagtggttagggtattttcttacccacacgcaggcttctgtactcgaccatttctctccctcgcccttcctcttcctccgccgagcactttgctcggctcctgctgttgatgcttgtggttttgcagtttgggatgggatgcgttccgggcagatccctacctgtagggaatgccccgcttcaaagttgacctcctgagccatgacaaacacctccccccaacccccacccaccttgtgagtgctcagtgtcctgataactgagtcaaagtttctgagactgggctagtactttgcactggtcgccaacggtacagggctgggcagtgcgtcagcatgtggaaaggggccaccggctagcgggaggtggccgggtgcatgggagctgaactgacgggtttcagatactaggcagtgtgtccaggtccttggatctctcagatagggttatattagaatatgtaccaaaacttgggtggtcacttgcaaaattggtttcatgcaagtaaactgaaatgccagccttattacactaatggtaaggagaacttttgcttgcctgacagatttcagcgcagtttggaaaatgattttaaggcctttatttttggcactggaggggtttagggatttttaatacatttaaatttcctcgtgcatagtgggaggtaagtagttgcttgttaaaattctgaaaacacagtttcatgaaaaccttctgacttttcttacagtagtgtttatatttggcatcttccgtagaatatccattagttatgatgtcagaagatacggatgtgaagtttgctttttgtgatcacattggaagtggattttgttcatggaaaatactggttcacaagctcctagtactagaaaactggcctgtgattcattttctcagtagagcgtcccttatgaaattgacaatgagatttctaaggagaaagactagttgaactttatgtatacattatcatcaaattgtattaaatgtacacctgcctgaggggttagctctagactttgagttagactggtgtctatactaaatcagttcaataaatgcgctgatattatgtattattcatttggagagaagtagataaagcagggcagagtttatattttaacatattatgtagcctacatttgctctgatgtgtattattattattattattattattattattattatttttgagacgaagtttcgctcttgatgcccaggctggagtgcaacagcgcgatctcggctcaccacaacctccgcctcccgggttcaagcgattctcctgcctcagctttttgtgtagctgggactacaggcatgcgccgccacgcctggctaattttgtatttttagtacagactgggtttctccatgttggtcaggctggtggaactgctgacctcaggtgatctgcccgcctcagcctcccaaagtgctgggattacaggcgttagccacagcgcccggcctctgatgtgtactagtaagtcatatggggagaagtagatgaaatagggtagagcttatatgtgaacatattatataacctacattgtcctctagaaagctggaaacaagttagtaagtctcagtactattggggcatatggtgaatatacaaaccaacctaaaaaagtgtgactgtaaatagatgaagtttgtttgtttcttttaaagagacaaggtctcgctctggcgcccaggctggagtgcagtggctcagtcctagctcactgcagccacgaagttctggtctcaagagatcctcccacctcagcctcctgagtagctgggaccacaggcacatgccaccaaacctggctaattttttgttttatttttgtagagtcaagggtctcaccatgttgctcaggctagtctccaactcctggcctcaggcagtccttgcgcctcagcctctcgaagtgctgggattacaggcctgagccaacggtgcttgtcccattttttttttttttcacctgagttatttgatgggaatttctatatattacagttgcgatgttctgagaatttttgtttctttgataattgtttcatgatttagatgttttctttttacgctggtagttatgatttttttttcctttgaatgaaagaattttattaggcatgtgaaacaggagttttcatgtgatcagctctccagttctaaatttgtgacttttaaaaaacttgaatttttttctttgccttaacccaaacttgaatttgctcagccattgtatatttatttgaactctcagatgatacagcattgaagcagaaagtccttttatccatgcttttggagtaatcaaaagaaggaattctgttgtgccaagtaaaaatatgtgtgggagatagctaggcttcaagagattgactttgaagagagtagtggctaagtagcaaaaatttcctatattgaaggtgtagaagtgggcctgcattccaacctaccattgtcttcaagtggggtatggatcattatgactggttagagggggtttggagaatgaagttgttgctgtaagcctatgggattcccaggcacagagcttgcttatgtcttaattttaatgagttctatatttttataactcttgacttatataaatgggtcagccgttgagtctgaggatgaccagcagcccaaggctattccaggtgctggtatttctttttttttttttttctctttctgttttttttttttttttttttttttttaattatactttaagttttagggtacatgtgcacattgtgcaggttagttacatatgtatacatgtgccatgctgggaattgaacaatgagatcacatggacacaggaaggggaatatcacactctggggactgtggtggggaggggggaggggggagggatagcattgggagatatacctaatgctagatgatgagttagtgggtgcagcgcaccaggtgctggtatttcaaagatggctcaggggtttcttgtggagatgatctgatgagcattttgccattacaaacagtggaggcggagaaagtacggacttgagcctgagttatggtaaaacatactcatttttaaaggagagttttaatgctgatattatagagaaagacattgtttgactcctagactttcagaacgggaaataattttgactttatagtcagtatttgaattgggtataagtatgtgaacatcagtggaccctaataaggaagagttaatgaattaagaagagcttgcatctctgaacatcttctttttatacttcgtttacttcccatattgctcttattcaacagatgggatggcataattgggtatacgaagtttatgcgcatgctaactcttttttgttatcttttggtgttttttggtgtactttttggggattttcctgggaaagttctaggcatatattcagttgatttagagttagatttgggctaagattattagtatacttgaaattctgagccttcttattttctaaatagcttttaaagtagaaaacatttgccagtgctgttgggcttaaaaaaaaaaaaaacccaacaacaacacaattctttataaatactcatgaaaaatctggttacaggctgtgttgtgatagacatagtacagccaaaaatatatttaagaaaattctcacccagtttagtaagcttaaataagaggaaaataagacagtttttttttttaataaaaggctgattttcccagaatatgaagcctaacaactgtttgctgtgttattttccctgttgcctgttctaaattcagcaagaactatgcatccctagtccatggtaaaagcttagttccagtaggtgattcttagtaatggaagtctcattgagggatgcaagggaatttgattgggaaacatcaggcatggaacatttactttttactgctctaattttctgtgtatctgggtattcagtggggtgggaacatgagcacaaatactagaattatctggattttttttttatactatggatttcctcctcttaccccctacctgccccccaacccattgctaagtgagccattgatagtaggagtgtgttatatccttcaggtatgtagggctgaacaaatgctaaaaaccttggcacttggctgatattccataaaccaaattcctgctctgtgtaatttgccttctggtgatatcagtttgttactcccatttttgaagaaaaatatgaattgtggtgaagagacatctgtaaccaagagtaagatttatcaaattatgtagtatacatgaaggacaccaggagattgtttacctgaacatttattaaactcatttgactgtgacccacaataaaaaatacattttactacttgattccgcaagcgcacacacacacaaagttgaaagtttggtgaaataatatttatcttttcagggccctactgagttagctataatggcttgcaagaccagttgtgcatatttcttcctatctagctctttgtccagtgacatcatgttggtagctcaaaattggtcatggtgggaatatttacaccaggaaattcagcaaatggtattcttagggcttccctcctcataggtagttgttaaacatttatagcaccccactgcttataacacacattgatatattctgttatttcatttcattttaaaaatgctgggttttgacttccaaattaattttacacccagctaatggattatagcctacatttaacaacaaatacaactagtttagcctaccctcttaactttgtaagtgaaggaacatactaagagcctcaaggccaaggtcagatagtgagttattagcaaagccagggctctggactcaatctggagttgtttctggtgggcttctttcctaacctcacttagtgtgtataagggattgtgttaatcagtttgaataaagatggaccttgaccctgaggactttatgcttaggtgggggattaaatatggaaacaacagtgataatgaaaggcagaaagtaatgggtggtaaaaagataaagataaggaactataagagtttagagaggagggagagattacttttatttttgtttgtttgtttgtttttcgtttttgacccaggctggagtacagtggtacaatctcggctcactgcaacctctgcctcccaggttcaagtgattctcctgcgtcagcctccctgagtagctgggattacaggcgccaactgccacaccaggctaatttttgtatttttagtacagacggggtttcgccatgttggcccggctggttttgaacttctgacctcaggtgatccatccgcctcagcctcccaaagtgctgggattacaggcgtgagccaccgtgcccggtctacttttagttttaaggataaaagaagaggtgacatttgaactacttttttttttttttttaatttggagacagcatctcactcccgttactcaaactgagtgctgtggtgccatcacagctcactgcatccttgatttcctggcctctaacagttcttctgcctcagcccccaagtggctgggactatataggcacacaccaacatgcttggctaatttttcattacttgtagagacggggtctcattatgttgcccaggctgttcttgaacttctggactgaaactgtcctcctgcctcggcctcccaaagtgctgggattacagttgtgagccaccacgcccggcccctgaactatgctttgaagaatgggtaggatttggacatgtggaaataggacaactagtatgagagaaaggcctttctgggccaggggccagggtgatcaaaggcatacaagcatagacagggaaaaatgagtagtgaaagagctaggcaagaaagagtccgttagcaccagatggttaagagcctagaatgccagttttcctttctgcttttcagtttatctttcatttttgactctggagtaatctagtacttcttaacattgaacaggatttatatgttatgattaaaatatgatccagagagcacataagtatccttagagtagaagctgaagggaaaaattattagtgttagagaagcaaccttgagtttaccaatcctaaaagtgttggaaagtgaaaaatattttatttgtaaggagagacagtgttttttttttgtttgttttttgtttttcttcattagcgtcaaattggctgtagtagaacaggaagcagttttgaaagtctttacaagggccttctaaaatgtgatttctaaatgactggatcttaatttttggaggcaggtttagttcaggcagaagggtagtttatacagatctgcagctaagctgagtagcttttagaatttagggcagcaaagcagggtattttatacaaaatccacttgtaaggaattgatggcttctttattccaagaattttcttagatttcagcatttatgtctttgacagcctgtatgactgaagatgttttgaagtcttggatggaacttgccttgtttcacaggggaattgggtagctagaaatgaaggtataaatgccagtaagttgtgtctgttaatcaagttgaagtactggtggcagttctcaagcttttctgtctgctgatgatttcacacttactgcttctaattaaatagtgtgtagtcgatttgaagaagccttgcttctctttgacccaccagttctgtaaaggtaaaagccttcttagagtgttgcccaggtaacaacacatacagagactgcttaatagctcatcatggaagtgtgtggaaaattttggaaatgttggtaaagaagttgctatagtaaataactacttggttggtaaaaagctgggctacttctggatagttgataaagagtttttgagatgagccgtggttctaaaataaatatgaattgtgtcattgccacacgattttcttcagttatgtaagctcctaatatgtaaatgttgtcctaccattttagaaggtgtcagcagtttcatgtgacctgttccacaatatagcacaccccaaacaccacgataagagttcaaatatggcatggcccagatgcctcacaccagttaaatgataaagctaatcatgtcagcacagtgtttctgttaaagttttttccccctcttttttgaggcatgttagttttcacgaattgaggttattagaatctttccagattttctgccaccattttttttgtgtgtgtggtaaaaagtataatgatggtgcccttaattaaattatgtaaacatttgtaaagatatacacgcatacacatagtgtgcatatatgtatgtgtagacatacatacatatatatttacatatcattagttcttggaatttgtggtgaaaatacacccacctggcaaatggttgaaaacaagtgttctagctctttgaagactaccatgtgagtattcacaaatatgaaagtaatgcaaacccaaagggagtttttgtatgcccaatttcaagaaaggagcacattttaaaaggcaagtatggaattcattcatataccagtgaggaatttctcaacttctcctttaccccacacatacacccgtttaccattctcattattagcagtaagcaaaattagaagactttaagaatcagacttctactacaagtgatgcaaataaatattatttttagaaaaaatacaaacctgtggttttgagttatgaaggtttaagagacacatatcactagttttttttataaactacatggagtgttttctgtgcttcaagatgtcgtaattgtcattgtgaggccttttgctgagagcattgtataaaggaatagttgttagaatggttattaggtgtttctttgaatagtttatttttctgtagtcaatttatcttgcatacattgatggccgggggtggtggcccacacctgtaatcccagcactttaggaggccaaggcaggcagatcacttgaggctaggagtttgagcctagcctggccaagatggtgaaaccccacctctgctaaaaatacaaaaattagccgaatgtggtggtgtgtgcctgtagtcccagctacttgggaggctgaggcacaagaatcccttgaacctgggagatggaggttgcagtgagccaagatcgtgccactgcactccagcctgagctacagagtgagactcggtctcaaaaaaaaaaaaaaaaaaaaaaaaaattgaatagagtatactactttagtgaaaaattgaccattgaaaaatcaaccattgaagggaggttatatatatattggcagacagtagggtttctgaagttgttttagaataattttgttattgagcagctgttttatcaccagacctcattcatttattattgcttttttccatttttttttaaatctcatgaactgtattctttcattttaaatctctcatatttgccctgaagtcagtggtcatatttggactaatgttttgatttgctgttgtctgcgcaaagatctattaccaagttgcatgatcaagttggtattgaatggtaattcagttaatgtcttcttctctccattccttttttccttctgtattctagaagttaccttaacactagtgtgagattcctggcaaagttaatggggaaatgaaattaaatattactgttattcaaatcctagggtgacctttttgccaacactaatgaacatagaaaatttttcagcatgaattatgcagcttaaattttcactgaggctaggcctcttaagtttaaaaaattaaaagttaaaaaaatatttatggggtacaagtgcagatttcttacatgtatagattcttacatgtatagatgtggtgaagtctgggcttttagtatacccatcacctgaatatccaccattctgtatgtccatgtgtacccattgtttagctgtcacatataagtgagaacatgcggcatttgactttctgtttctgagttattttacatatgataatgtaggcctcttaagttaaaaaacattctgacatgcattttatagttcttgtcaacattatcaatagctttgatagatgaaacaggtttctcctgttgcagttggtatcacacacaataaattagccatccctaccatttgaaaatataaaggtgttttttttttttgacacggagtcttgctctgtcgcccaggctggagtgcagtggcatgatcttggctcactgcagcctctgacctctgcctcccaggttcaagcaattctcctgcctcagcctcctgagtagctgggaccacaggcacgtgccatcatgtctggttaattgttgtatttttagtagtattttcactatgttggccaggctggtctcaaactcctgaactcgtgatctgccagccttggcctcccaaagtgctgggattacaggcgtgagtgactgtgcctggcccagataaagtttttttaaaagataatctagtaatagtaggaaagagaaaccagtttatcagttaatctaatacttcctattttgaatataaatttcattgtgttgcatggtaacttcattatgttccactgagtatttacttttctaaagacagacctttaacaatttttcctttttttcatgttttggagacagggtatctctctgttgcccaggctggagtgcagtggcacggtcatagctcattgcagcctcaaacttctggtctcaaagcgattctccaaccttcgtctcaggagtagctggtgggactataggactgtacccaccacactctgctaattttttaaatgggagtctccctatgttgcccaggcaggtctcagactcctgggtttaagcaatcctcctgcctcagcccttccaagcattggaattacagatgtgagccactaaaccctgcacaatttttcaacttttgggaatttcacttagaggaggataatagtagcttttagacatttttatcagttatccaagggtggaaaaaaatacttaaaatgcaagtaactacaaacatttttggttttgtgggagacagtgtagatagaacatagaaccttaattcttgatctagtgctgctgtgaaattcagagagaataagtaatttagacacaacttctttctcctctttgcacattaaccatgagctaatattgagtgtttacatggggtagttattacataagaaaatgtacattatctcgctaatcttcacagtaaccatatgaggtaggaacgattataatatcatctccagtttgcaggtgaggaagcaggattagagaacttcagtaacttacctaagatcacatagccaggcgccgtggctcatgcctgtaatcccagcactttggaagtccgaggcgggcagatcacgaggtcaggagattgagaccatcctggccacatggtgaaaccccatctctactaaaaatacaaaaattaaccaggcgtggtggcatgtgcctgtaatcccagctgctcgggaggctgaggtaggagaatcgcttgaaccagggaggctgaggttgcagtgagccgagattgcgccactgcactccagcctggacagagtgagacgctgtttcaaaaaaaaaaaaaaaaaaaaaaatcacgtagcttgtgagaggcagttatctcttgcttctaaatctgtctcacagtgactctctactactactctgtattgacaatctttaaatgggatggtacttgttttgcacatttcataggatagttatgagaatcaaaaaagataagatgtacaaaagaacacacagatgtctctggtgtattcattttattggataatatttgagacaccaaagaaatctttgaaatcttgtacacatatttgtttgtaatcagtaatgctataaaataagttgaacagatgaatatttgaaaagttatctataaagacatattttgtgtgggttcaagggatctgtgagtgaaaggtagaggaatgcagaaatgtagggatgtattataaaaagtggatcagatgatctctagcagcctgaattctttctgcaatgaggagtatatgtaaataacaggtgacctataagatccttccaacatcaataatctatgagtctttgttatgggttacttattttctgttagaatatcctcaaattagcgagatatgcccaaaagagctttttaattttattttagcttagatcatcaataatcaccattctttctttgtccatttctaaaattgtttatatttaaggtatacagcatgttttgctatacatatacaaaacatatacagatacaaaatcatgaaatgatttttatgttttgatacacagatacaaaatcatgaaatgattactacagttaagcaaattaacctatccatctccttctataatttttaaaattgtggtataagcatctaaaatctgtcttagcaaattttatatatactatacaatatgaataattatagacttcgcgctatacattagctctctagacttattcatcctacataactgcgagtttgtaccctttgacctacttattcccatttcgtccccctcctttcccctggtaactgtggctatactcttgtttctgcgtattcagctttaaaaaaaaaaaaaaaaaaggatttcgctgggtgtggtggctcacgcctgtaatcccagcactttgggaggccgaggcaggcagatcacgaggtcaggagttcgagaccagcctgaccaaaatggtgaaaacccgtctctactaaaaatacaaaaattagccaggcatggtggcatgtgcctgtaatcccagctatttaggaggctgaggcagcagaatcgttttaacccgggaggcggaggttgcagtgagctgagattacaccactgcactccagcctgggcgacagagtgagactccatctaaataaataaataaataaaaagtaaaaaaaaggatttcatatataaatgagatcatgtagtgtctttctttttgtgtctggcttatttcatttaacatagtgtcctccaggttcatctatgttgtttcaaatgacagtatctcctttttttttttttaaggctgaataatattcccttgtgtgtgtgtgtgtgtgtgtgtgtgtgtgtgtgtgtgtgtatatatgccacaaattctttatctgttcatcttaggacagacacttaggttgtttccataatctaggctattgtgaataatgctgcaatgaatatgtgaaagcatatatctctatgaggtgctgatttcagtttctttgggtgtatacccagcagagggattgctggatcataggcagttctatttttaatgttttgaggaacttctataccattttccgtaatgtctgtgtagcaatttacattttcaacaacagtgtacaagggtttccttttctccacactttggccaacacttttgtctttttgataatagccatccaaacaggtgtgaggtgatagctcattgtggtttcgatttgcttttccctgataattagtgatgttttcagtgctttttcatatacctgttggccctttgtatgtcttctttggaaaaatgtctctttaggttctttgcccattttttaattgggttatttcgttttgttttgttttttgctgttgagttgtgagagttccttatgtattttggatattaaccctttaccagatacatagtttgcaaatattttctcccagtccataggctgccttttcattttgttgtttgttttggagaagctttttagtttgatgtagtcctacttatttatttttgcttttgttgtttgagcttttggtgtagtatccaccaatatcattgccaaggccgaacaatatcagggagcttttcccttgtgttttcttctaggggttttaaggttttattatagatattagtgtttacttctttaagctattttagcaaacattctttaaatgtcagttgcacttagattgaatataaatatataattatctgagtaagatgcagctatggtgttttgctttttcccctccaagttaaaaagattttttttttttttttaagatggagtctcactcttgttgcccaggctggagtgcaatggcatggtctcggttcaccgtaacctctgcctcccaggttccagtgattctcctgcctcagcctcccgagtagctgggattacaggcgtgcaccaccatgcccggctagttttgtatttttagtagagatggcgtttctccatgttggtcaggctggtctcaaactcccaacctcaggtaatctgcccacctcagcctcccaaagtgctgggattacaggcgtgagccacagcacccggctgttaaaaagattttttagaggatggggtgggtgaagtggcttactattacattattacatacttggttcttaatgcatttcttatgacttcctctcaaatttggatttcctgagtgtgcattttgagaagaaacttaatatcattatatatatgaaaggtcattttaattttatgtagtaagtttatggctttttatacagttggtttcattctctgtcgtttttttttcaacaagtatttatttataaggtagaatatgggttttgtgctggagaagcagagatgagagattgttgaagagctgacagtcttattggggaaacagatgaatagagagtggcaaggaaggggcaccacaaggtgtgtcttcagaaggatatgtaaactgatctgggtttcaagtaaggctgtctggaatatctgagttgagtttatagaaagcaagagggatattttagatataggtatgaaactttgaaatagtaagtctttacctatctagactcagtggcagtacctcatctctctgaaacattacaaaagcccccaaatagttgtcagtttaataagaaattctttataaataaagctctttaggctgtcgctgagagcttatttttactttatatatgatacttaaggtttctaaggttgtagtagattaaggaggaataatttacaagcagcaagatgctgcaataaacatactgataacaagacagatttctgacaacatgatagcaatgaagaaattggaaaaaaaatacacacacacacacacacacacacacacacacacacacaactgaataagtcatagataatacaaggaaaacatccttggacaactaaattagctttaagggtatcaaatgtatttgtaatactatagaataataatgaaagtttgctgtgctctctgttaccaagaagacatgaaatatatgtcctgtatagtatatatattagttaggattcttcagagaaacagaaccaataggatagctatgtgtagatacagatctgttggaattggcttacacaattatggaggctgagaaatcccgtgataggccgtctgcaaactagggaactagggaaaccagtagctcatttcaagtccaaaggcctgagaaccagcagagccaacattgtattaggttggtgcaaaagtgattgaggtttttgcaaaataactctcaattcgaggctgaaggctgaaaaactagggggctgctgatgcaagtcctggagtccaaaggctggagaacctgaagttctgaggtcagagggcaagaaagacaaatgtctgagctccagaacagagagtgagtgaatttgcccttcctctgcctttttgttttatcttatcccccagcagattggatggtgcctgcccacactgggtaagggtagatcgttcttactcagtctattgattcaaatggcagtctctttgggaaacaccctcataggcaaatgcggaaataatgcttttactagctatctgggtatcccctagtttagtcaagttgacaactaaaactagctatcacagtaaatttatgaaggtgtcaaagtatttatattactaagatttttaaaatatgaaataggatgaaaaccagggggtaaacttagtacagttatcaaattgtttttttcagcatgattgatttctaaaaggctttgaataaccatagatttaattttcttgtatatgacacagaccagtagattatggaatgctagacattgttcagtacaatattatataactgtagttagaaattacttagataccagagttatggttcttaaccacttgggtaccaagaatttttagagagcatgaaccatgtcgtctttttgttctggatggcatgaagttggggtctgagcatagatatcatcttaaaaagcctttcttgagactgtggtctctgttagaaatctctcatttgtgcttttaaagcattcagttttcctctttgttgtcatactaatcacattgtattgcaacttgcctgtttctgcattagactacaggctttcttttttctttttttttttttttgagacagagtcttgctatcttggctcactgtaacctctgcctgctgggctcaagcagttctcctacctcaacctcctgaatagggactacaggcacgtgccaccacgcccggctacttttttttttttttttttttgagacggagtcttgctcagttgcccaggctggagtgcaatggtgcgatctcagcttactgcaacctctgcctcccaggatcaagcgattctcctgcctcagcctcctgagtagctgggattacaggcacccaccatcatgcctggctacattttgtatttttgtagaaatggagtttcaccatgttggccaggctggtcttgaacgcctgacctcaggtgatctgccctccttggcctctcagagtgctgggattagagacatgagccaccgtgcccagccagtattacttaattcttataatagtcctgtattactaacagtttagcgagaagacagcattgttttagattttgcaaacctgtgtaatgtctggctttgtagaagacagacaaattctcatatttgtcactgcattcaccctattgcagtatgctttttgggttgaaatatccaaagaaaagctggcctcatatgtagcttgtaaagggaggagtattttaatagtcttttaaggtaatgttgatatttttctttcatatcacaccagaattctacagttggtagttttatattaatggttagttgccatgtaaaatcttacatcacattaatgaactttttgtaacctgttacatttaaaatccactggtctgtcttgcagtttgaatggatcttttatctatgtgtaattttataactcgtcatttgtaaggcattggttcactgatttatgcagatctttataatattggcacatcttattatacaatataaagaagtcaagctgggcatggtggctcacgcctgtaatcctagcactttgggaggccgaggcgggcggatcgctggagcttaggagttcaagattagcctgggcaacatggtgaaacgctgtctctaccaaaaatacaaaaaacttagccaggcatggtggcacatgcctgtagtcccaactacttgggaggctaagatgggaggatcacttgagcctaggaggcggaggttgcagtgagctgacatggcaccactgtactccagcatggacaacagagggagaccctttttcagaaaaaaaaaaaaaaaaaaaaaaaaaaaaaaaaaggtcaacatttgttaatactgccatcagtgtcatcagaaaagtcttctaagggctgggcatggtggctcacgtgtgtaatcccagcactttgagaggctaagtcaggcagatcatttgagtcagaagtttgggaccagtctgaccaacatggtgaaacctttactgaaaatacaaaaaaattagctgggcatggtggtgggcgcctgtaatcccagctactcgggaggctgaagaaggacaattgcttgaacccaggaggtcaaggttgcagtgaactgagataacaccactggactccagcctgggcgacagagtgagaccctctctcaaaacaaaacaaaacaaaaccaacagtgtaaaacgttcctgtttctccacagccttgccagcatctgttggttcctgactttttaataattaccattctaactggcgtgagatggtatctcattttggttttgatttgcgtttctctaatgaccagtgatgatgagctttttttcttatgtttgttggccgcataaatgtcttcttttgagaagtgtctgttcatatccttcgcctacttttgatgggattgtttgtttttttcttgtaaatttgtttaagtttcttgtagattctggatattagaccatagttagatgggtagattgcaaaaattttctcccgttctgtaggttgcctattcactctgatgatagtttcttttgctgtgcagaagctctttagcttaattagatcccatttgtcaattttgggttttattaaaattgcttttggcgttttagtcatgaagtctttgcccatgcctatgtcctgaatggcattgcctaggttttttcctagggttattatgattttgggttttacatttaagtctttaatccatctttagttaatttttgtataaggtgtaaggaaggggtccagtttcagttttctgcatatggctagccagttttcccaacgccatttattaagtagggaattctttccccattgcttgtttttgtcaggtttgtcaaagatcagctggttgtagatgtgtggtgttatttccgaggtctctattctgttccattggtctgtatatctgttttggtagcagtaccatgctgttttggttactgtagccttgtagtatagtttgaaggcaggtagcatgatgcctccagctttgttctttttgcttaaggttgtcttggctatatggattgttttttggttccatatgaaatttaaagtagttttttctaattctgcaaagaaagtcaatggtagcttgatgggaatagcattgaatctataaattactttgggcatatggccattttcacgacattgattcttcctatccgtgagtatggactgtttttccatttgtttgtgtcctcccttatttccttgagcagtggtttgtagttctccttgaagaggtccttcatgtcccttataagttgtattcctagttattttattctctttgtagcaattgtgaatggcctgatttggctctctgcttgtctgttggtgtataggaatgcttgtgatttttgcacattgattttgtatcctgagactttgccgaagttgcttatcagcttaaggagtttttgggctgagatgggtggtggcagtataaattagttcagccattgtggaagacagtgtgtcaattcctgaaggataaagaaccagcaataccatttgacccagcaatctcattactgggtatatacccaaaggattataaatcattctgccataaagacagatgcacacgtatgtttattgcagcactatttacaatagcaaagacttggaatgaacccaggtgcccatcagtgatagactggataaagaaaatgtggcacatatacaccatggaatactatgcagccataaaaaagaatgagttcatgcccttggcagggacatggatgaagctggaagccatcattctcaacaaactaacaaaggaacagaaaaccaaacaccgaatgttctcactcataagtgggagttgaacagtaagaacacatggacccaggcaggggaacatcacatactggggcctattgggggttgggaggcaagggaagggagagcattaggaaaaacaggtaatgcatgcagggcttaaaacctaggtgacgggttgataggtgcagcaaaccaccatggcacatgtatacctatgtaacaagcctgcacattctgcacatgtatcccaaaactgaaagtaaaacaaacaaaaacaaaacaaaacaaaacaatcccagaaaagtcttttaagtagtgtgaggctgttaagctagtttttttttattttttatttttcaagagacagggtcttgctgtgttgcccaggctgtactcaaactcctgggctcaagcgatcctcttgccttagcctaagctgatttttttttttgcttgaagctaaaattttatcattggcaacaaatactgtcagttgttttcttcgaattgactgtgttagcttgttccattgagagaaaatgtcttccaaatacccaagtccttacaactatagtttgtcagttagttgttctttaaagtaaaaatggtactctgtgaagaaaatggttaatttaacttgccactcaaacaattgcacaagtgcattttcttctgaaaactattatactttggtgtgcagcagaaatactttgtgtatttcctactttgtcacatagaatgttaaaaagatgtgtgctcaaaaggttggagataatttttactgtttcattaaagacagtcttagcacgtgcacacacacacacacacacacacacacacacacacacactttttaactgagcatatatggttgtacagtgactaccagtatactttggtgctgctgtttcatttgtgttaagacaccagcaatcttacccaccattgcttttgcatcatcacattagcacagtgaaaaaagcaaataatgtctcagtattattaggaaaattgctctgaccttatgaactctctgaaagggtcttgggggacttctggggtccatggaccacactttgggaatagctggaatagagcaagccctgtataagcccagcaatttgttgttcaatgttactttttcatcttatgtatgcatttaatgtagaaaataatatgttagtagtattcaagaatttggacatttgttaaagtctcagaatatattccttggagatagcaagagtatgctggagcaaacattttttaaataacttcattgaaacatgttttataatgcatattcttaagactcttcttcctaaaaggaataaagaattagttgagatttccataagggatacctttatatcagttgctaagttcagggtactgatcctgtataagaatagcttccaattcagatctataaacaacaaaatagtttagtgaaaacacacacacaggatttggagtggcagagaactagtagttctagagccagacagacctggtttgaaccctgactccactgttgtaaccttgggcaagttggtgtgaccacactgtcatttcttagcactctttactgccgctttatatgttcttgaggtctttcattagtactagaataatgatacaatgatagtgatgcatgtaatcatgacaattggaaacttgctatttcctccattagctaaaatttgaaagccataattgataaactttgcttaagttgtacatttttttgagataaggtctcactctgtcacctaccttagagtacaatagtgtgatcatagctcactgcagccttgaactcctgggctcaagggatcttcctgccttagcctcccaagtggctgggactgaaggcatatgccaccacgcctggctaattttttatatttttttgtagagacaagatctcgctttgttgcccaagctggtctcgaactcctgggcttcagttatcctcgtgccttggcctcccaaagtgctaggattacaggcatgagccaccgcatctggccaagttttacttttattttgtgaaaatagtacctggtagcctctgaataatatatatttcttgttgtgttttaaaatttgcttatttgtgttcatatattcactcttgataatttaataattattaaaacactctgtgcctggtacttgtttcatgctttacctgcattatttcatttaagatcaatatgtgaagtgggcacttctcttacatttaattcacagacgagaaaacagaggatacagggagattgagtaacttgtcctatatgatatggtttataagtggcagaactgagatgtaaactcttttctattaggttcttttttgctacaactaacaccagaaaagtagcttaaacttaggatgtatataggttatatgccagtactaagccatattattttattttgatttttttaaagagatgaggtcttgctgtattgtccaggttggtcttgaattcctatgcttaagtgatcctctcactttggtctcccaagtagctggaattatgtgcatgtgccactgtgcctagctactaatcattttatacaagggtctttctttttttctttttttttttttttgagacggagtcttgctctgtcacccaggctggagtgcagtggcgtgatctcggcccactgcaagctccgcctcccaggttcacgccattctcctgcctcagcctcccgagtagctgggactacaggtgcctgccaccacgcccagctcattttttgtatttttagtagagatggggtttcaccgtgttagccaggatggtctcgatctcatgacctcgtgatctgcccacctcggcctcccaaagtgttgggattacaggcgtgagccaccatgcccagcctgtacaagggtcttgagcatcatctgtggattttggtatccatgggggatcctggaatcaagcccccacagatactaagggactgtaaccaccattagtagggctgtgaagagagagtatgtgtgtaaggtcactattcctgagcatatgccagtaagggagacagcttaaacaaattaagggctctgccaacagaaagaagggaggtgggtaggaatgattatttacataggtaacaaagagtgtctgcacctttgtgtcttttaactactactatactgtactccctccctaatttaagaagatattttaaaatagcataaatgagggagaaatataaatggtaataaatttcaggatagaagaaatcctatggagatttgacagttacagtggttaggtagtctaagttctgatgcagatggataagtaatacagatcatgttaaaaagcaactttgggttgaattaatataactgtgtcctccgtggactgttgagtaaccacttgctttacttaaccctaattggcttcatattaaataatttggtttagctgtgtagtttcagggctatgggaagaaactgaggagattcggggaaaaaaaaatgaaatatgcattaaggagatgaagcataggctttctaagctaattaccagaattagtggaatttctctgtattttggttgagagaaagttagtaagtgaccttaatagttttcaagcttgtaaaatttctaagtcgaaatggttcttgtctctcccaccccttcaattcctagaagacgaaattgagattatcataaaatactttggttagaggtaaagaacagctttctgactgtagaggttattaaacactggatctcaggggaagagggccagctgtaggttttagtcaaaagatgaagtgaaaaggcaagacccataaatcacaaattatagtttaagcagtgaaattatagtttaagccatttttgaagctgttggagttgggacataattctgagtctgaatatttccacagtcaagctcctgaaggtcctgcctcccatcctatcctctctccccacttgagtgaatctttgttagcatttaagacttttacttccccccgtaaacagctctacaacagtgtagaatgtaaaaaattagaactgcaaatatgtgttgccctgacaaatacatcaactattttgattttctttcatgttgcctttctcagtatggctatttaaagtttcttaagacatttttttcccactaagttatttatatttattatagaaaaccagaaataacttctgtgaacatgttgtaatatttttctaaagctatttctttatatgcatgtgttttagagttgtgtgattctgtagtttcataacagcatgcataataacactgagttataatagttcccttattatctctttcctattagactgtgagcccctttaaggcatatattattgttttcatctttatataccttgaaaagttgatgtacttcacataaagatgaggcgagagttgtagatacaatttgtatattttcttgatctattattagcattttcttccaaattttattaaaatggatgccaataaaaacagatacattattcaactcactcttttgcccaggccctgccgtggtgaagatcacggctcactggggtgttgctttgttgcctaggttggtctcgaacttctgggcttaagtgatactcctgccttggcctcccaaagtcttgggattacaggtgtgagccactgtgcgagccgctgtaaccggcctaaagatatactttattttttaaagcagttttaggcccacagcaaaactgagcagaaagtacagacagttcctgcatacccctgcccttacacaacgtgcacagccttccccactatcgacattcatacatcagggtagtaaatttgttacagctgatgaacctacttgacacatcatttcttcaccttaagtctgtagtttatattagatttcactattgatgttatacattctatgggttttgacaaatgtatagtgacgtgtgtccaccattattagtatcatatggaatggtttcactgctctaaaaatcctgtcttcagcctattcctccctccctggaccctagtttgtcttgcctcaatacttttgccttttccagaatgtgatacagttgagtcacagaatatacagccctttcagattggcttttttttttttttttgagatggagtctcactctgttgcccaggctggagtgcagtggcgcgatctcggctcactgcaagctctgcctcctgggttcacgccattctcctgcctcagcctcccaagtagctgggactacaggcacccaccaccatgcccggctaattttttgtttttttttagtagagacggggtttcaccgtgttagccaggatagtcttgatctcctgacctcgtgatctgcccacctcggcctcccaaagtgctgggattacaggtgtgagccaccgtgcccggcagattggcttctttcacctagtaaaatgcatttactgttcctttgtgttttcgtggctttgtcactcatttcttagcatggaatagtattacattttgtctggatgtaccacagtctgtctgttcatctactgaaggacattttggctgcttgcaaggtttgacagttatgaataaagctgctgtaaatatccatgcgcaggtttttgtatgaatacgttttcaactcatttgggtaaataccagggagtgcaattgtggggtcatatggtaagactgtgtttagttttgtaagaaaccatcagactatcttccaaagtagctgtattattttgcatccccactagcagtgaatgaaatgacatcataaatttaaattcacttaaaatgtccaaaacgaaatctgtcagcatttttaaaaaaataaattaaaacaaaaacgaaacacttttaagctcaggaaagtaacctccagagtactttcagaatatcccagacaaattggggctttgcagattaatatttgcaggttgatctttgcctgggatcttccatataaaactaaaaaatgaagtctgtggtagctgttcttgcctagagtctctgctaacacagaagtttcgtgaaattttatggtgttaatcccttgtaaactatggatttagaaactcatattcccagactaagactagtctctttatttatttcttcaattcctagtagccaaaggtaattagattttacttttggcaggtgtatgctagcgatgtctactttatttaagaagatgctcaacctctaagtggtgtgggaggtgtttctaaaggtcactcaaggttggggtacagttgtggtggcaacccttccctgcctaacttgttgtttgctctatagggcaatgattcttgacctctttgggttatagatttcaatgaagtgtttctagggaaaggaggaacctgggagagatctgtcagtgctctctgctatccttttgtttgtagtgacagtatctgcaaaatatggggacaccttaagatgccttataatcttttagatctattaggttggtgcaaaaatgattgccgttaataacttcaaaatctaccggttagggatcattcagtaagcaagtaaatataccaactgaggtggagaaaagtgtaggcagcttgctttgagaattttagagctaaagtacagtgaagggtaattttaaattttacttcttttagaaggttttatttataattaaattgcttttttggttttatttgaataaatataaaattatacattcaaataattatttcttgaaattttctcctttattttaaaatgctggttagtatgtgatagttgtagcacatttaaagaagaatacaagtaaaaagtgcaattctacttctccctatacattgtttaataagcatatgccttttaaaaaatgaccttataatgggctgagtatattttggatattgttctgtggcagcataataccacataacttaattaactgtctccttattgttaaatgtttagattccctccttcctgcaccccctttgaaagcaatgctgacatgtgtgtccttgtaattgtactttgatatattggcaagtattttcctgggacagaattttgcagatggatcactggattattgtgtacatttactttaaaatttgcttaaagtcggggcgcggtggctcacacctgtaatcccagcactttgggaggccaaggtgggcggatcacctaaggtcgggagttcgcgaccagcctgaccaacatggagaaaccccgtctttactaaaaatacaaaattagccaggagtggtggtgcatgcctgtattcccagctacttgggaagggtgaggcaggagaatcgcttgaacccgggaggcggaggttgcggtgagccgagattgcgccattgcactccagcctgggcaacaagagcgaaattccatctcaaaaaaaaaaaaaaaaaatttcttaaaaattttcttttaattctaagagagttttatgttgacttctagtgctttttgggcgctgatgctcacacttattttgataaagatgaaagatgtttaccaaatagaatattggacatagaaactcccaaggaaattctctacgtagctgaatttcaggcagatggtgaagatgcaaggataatctcacaaagttatagctaacaatcactaattctgggtgatttggcaatgttttggcaagcagttattttaaactgctttctagtaagaaataattaaagtcaatgctttgatttaaaaagaatgcatatggttaaaatttaaagagttcagaatgctatctgtctactatatagatccctgctccccttctacaccaacctgtagaaaaactagtcagctcagttattcagaggctgatttcccagtttgttattatctgtgtacttttattctccacatttgacctgttactactcagttctacatctgctagtatggacatgtaaaggaaagggagagaatgtgatcagatctagtaaatgatgggttaattgaagaagttgtttaaagttaggagtcataaaaacataacatacatacactttaaacattttattttaacttgaaatcgaggtatacatttatttaccaagattttgatgttgggccaaggccttctggcattctatatcttggtctttctttcatccatttcccctataatgcttcattgtagatttttcaatgtacttaaaactttaaatccttaaatgtggtacaagactgtacattatgtggctctttgccagtttcttcgaaatctacttatccttaggttttctgtgataagtttcactgacttttcagtttccgaaacttgcctcagcgcctttccacatattgttcccataacctggaatgataatttctttaaatccttggctggcccagatcttttgaggtctcttctcaaatgttctgtcctcagagaggcttcgtaaatattagataatattccagtataaagtaggataaccccaacctccccacaagcccactaatatcacccttttctcttccttcactctacctgccaaatgtggcaggtagagtgaaggaagtgaacagggtaattttctttttacaagactgaagcctctgtgaaggcaagggccatccatatatattgggtttaccatagtgtaatagcctttggttagagcagtgtctgctatgtaataagaagcttaaatatttgtagacttaatcaaatgtttattatttatatataaagtgtcaggcactgtggggggcattacttagtaaaatgccacttagtcatctcattgatagcctatagtacattttaaaatggaagtgtgtacatccaagtatgcatttaatgaaatatgggacatttaaaaaagttttcagatgctaatactgaagagaataatgcaaatttactaaaataattaggaccctttttaaaacatgggggcaatgttgcttatctttttaaaaatagtcatttatttttcgttcactatcttaagaattctgatcatcttgtaggaaacttagaaacactaggaaggtcataggcactattattaataattatagaattgttttcctctaaattagagttttctttgtgaccctacataacgtaatgatatttgctctctggagagccaaatgggcctgaagtatagaaacagaactgaaatatagataattaaaactaaactaatatactataattctgattgttatgtcttaagatttgttggccttaataaggtgtgctgggataaacaaaaaggaaggcatcatttgtaaaggttttcttctttaatcccacttttgtttttgcatgaccagaaattctctgatatagcagggtatactttatataaagactatgggcagtaagtgtttagtgtttgtctttatattaggtctatagagtgtggtttcttgattatgggtgaggaaattagcctttcaaattccattagctgtaaagtggatttggatttggtatttgtattggttggctaatttaattcaaatcttttaaaattctcgtgctgaaatgatcttaggaagatcaaaatttctctaacagaaattattttggtctttgaagtgtataaatttaacctgttcataaaataagtattatcagctggtatgtttcttatacttttctgggaatacaaaaatgaataaagcatggtggttgtcttagaggaaataattgtaattgatgagatacatataaataatgtgatacgataaatgctagagtaggaatataaattatgtcaagtgttgtataagcactgtagagggagtgattgattctttgggagagttggagaaagttttatggatttgttaatccagacatatctaattattagggtttttaacacttttgtgtcttctctttttcctgtttagcttggtactttgccgttagaactcttgagtgaccaggtgcattgtaaatgagcaataatattttgaaagaaatcttttttcctgagcagtgggtctcaacaatggttttaaaatactcagtaaacagtgctctaagcagatgtgctgtcatttaggctttgttgttccatttatacagcacaggcagagtagattttgcataatttttaagggccgtatgatttttggaatgggatatgaacattggctacaacttaaagtcaccagttgtgttagcctctaacgagagtcagcatgtcctttgaagctttgaagccagtcattgacttctctctagctatgaaagtcttagatagcatttatttatttatttgtttatgatggagtcttgctctgttgcccaggctggagagcagtggtgtgatcttgggtcactgcaagctccgcctcctgggttcacgccattctcctgcctcagcctcccgagtagctgggactacaggcgcctgccaccacacctggctaattttttgtgtttttggtagagacggggtttcactgtgttagccaggatggtctcaacctcctgactttgtgatccacccacctctgcctcccaaagcactaggattacaggcgtgagccacgacgcccggcagatagcatttctttcagtagaagattgtttgtttacattgaaaatctgtggtttaatgaagccacatttatcaattatcttagccagatcttctggataacttactgcagcttctgttactgtattagtacttactgcttcactttatacttacatgtcatggagatggcttttctttaaacctcgcttatcgtttgaatatttctcccctccaaaacttctgttgatacttaatttccattgtggcaatattgagaagtgtggtttttcagaggtgattgggtcatgagggctctgccctcatgaattcattcatggattaatgtgttagtggattatcatgggagtgagactgactcattgctttttaagaagagaaaggggctggatgcagtagctcatgcctgtaatccttgtactttgggaggccaaggcaggaggattgcttgatcccaggagtttgagaccagtctgggcaacatagtgagactctgtctctacaaaaactaaaaaaataactagctggatgtggttgtgtgtgcctgtagtgccacctgtagtcccaggctgggtgacagaatgagactctgtctccaaacaaaaagaaaaaaggaagagagacctgagctagcatattcagcctctttgccatgtgattccctgttctgccgttctgctcagtactctgcagagagtccccacctgaaagaaggcccttggctgggtgcagtggctaacgcctgtaatcccagcactttgggaggccgaggcgggtggatcatgaggtcaggggatgaagaccatcctggccaacatggtgaaaccccgtctctactaaaaatacaaaaattagctgggcatggtggcgtgcacctgtagtcccagctacttgggaggctgagccaggagaatcacttgaacgcgggaggcagaggttgcggtgagccaagatcacaccactgcactccaccctggtgacagagcgagactccgttgcaaaaaaaaaaaaaaaaaagaaagaaagaaagaaagaaggctctcaccagatgctgcccatttaccttgggcttctcagcatccataactgtaagaaatcatttttttttataaattaccaagtttcaggtattttttaataagcaatagaaagcagactaagataaatgacatgaatcagcatctgctagtttcatacttttcttctgcggcttccttaccctttttatccttgcttagaattgaagagttagagcctagctctggattgggatttggcttaagacaatggttggttggtttgatattctatccaaagcactaaaactttctactcagcagcaaaaggctgtttcactttcttaccatttgtgtgttcagtggactggcactttaaattttttaaaagaactttatctttgcattcagacttcactgaccggtacaagaggcccagcttttggcctgtctccgcattcaacatgttgccttcctcagtaagcttaatcatttctagcttttgctttaaaatgagagacttgcaacttttcctttcatttgaacacttagaagccattgtagcattattaattggcctattttcaatattgttgtgtttcaggaatagggaggcccaaggagagggaaagagatggaagaacggctagttggtggagcaggcagaacacacagagactttaaactctgaagttcgctgtcttagataggtgcggtttgtggcacctgtaaactattgcaatagtaataccaaagatcgctgatcacagatcaccagaacagatagaataataatgaaaaagcacaataaagtgaagcacaataaaatgaggtatgcctgtaccttataatagcttgaaaatttcttaaattctgtgttttatctcaggaatgtgtgtgaattttgcatttcattgcatactgttaataaaaatatagaaatatttgaattactgccagaaaaaggaaaaacaaaaatcatttcctgtttgtctgttgatttttgaaaactggggtgaatgaagagagctgacactacatacctggtttagcacttactttctttttcttagtgtatccctggtatgtttcagtttatgcctgaagatgtacgtcaccagtttgagaaaaaaagattggccagtcagatcatgaaacattgcattacttttctccctcttacgtgtagtatagccttggggaaaattacttaatttgagtctgctaccctcataaattgggccaataatgtgtacccatactttttttgggaggggatcatatagtagctgctaattaaacatttattagctgcttcctccttttcctgccacattcctgttgctttcttcttggctttaacccaggtcttataactgcttggtatgctttaatcagcttgcttactgccctgatggtttttattagccagtgcgtagagaataatgctagaagatgcttggggcataagctgagacattcctggaataatagagacacactgactcaggaacagtcagtgcacagggaaatgttcggatttagcttatcagagtaagcaaaggtctagaaatacatctacattaatcagtggaaagatgggccagactaaaaattggaattagaatgtaggactgaatgcatttatactagagtctgctttctgtgcagcagtaaaagcaggtgatattgacttagtttttttcaaagtggttagagtattagactgaatggtctaaaaatttcatagatggaagtaaaggtatgttcaaaaatagactttctctgaaatgttataattgaacttagaacatttatgttagtggttttattctgtaaatgataatactcattcctgtaattctctttatgttgtcagtgtgtttcattaactatatctgcttgatctcaaaccttgattatttctctaactgcgtaacacatggcagttggaggttcaagagagtctaattgagtcacttatccacctgtctgaggtgttttttttttttttttttttggagatggagtctgtcactctgttgcccagcctggagtgcagtggcatgatcttggctcactgcaccttcacctaccaggttcaagtgattcttgtgcctcagcctcccaagtagctgggattataggcacatgccaccatgcccagctaaattttgtatttttattagagacagggttttaccatcttgccagactggtctcgaacttccaacctcaggtgatccacctgtctcggcctcccaaagtgctgggattacacacgtgagccactgcacccagcctctgatttcttaacagagaagagaaacaataagccaaacatggatcaaaataaagtattgagcttcattactggtaaaggtgagttagaaaatgtggtgaatattacagtattgcactcctagcaaaaagtgaaagcccccacatgaaaataggagaacaaaggaataggttttttgccagagtcccttcacataaacactttgggcaggaaactaggcaggcatgtcaccattgggcttcagatgggcacctgacaatgctgtcgttactgtaggagacagaccaccacaaagtgagattgatttggttgcttcagatctggactgaattatgtattttaattagctatattaaataaaacaaattaactcttttgaacgtattccttcatttgtaaggtgggaatacagttgagtgatgactgcgaacataaacatgactaaaatgcccagaactttctggtttatagtagtagtttctggtttagcaaatagtagtaataaaaggataactgttatccttaacagttattcttaacaaatcaaacctcgaatgtttacatctttaaaaattttaactgccacatttgttacattcttaaattgtgctgttaaaagtagacaacttggctgagcgcggtggctcacgcctgtaatcccagcactttggaatgcccaggcgggcagatcatctgaggtcaggagttcaagaccacccttgccaacatgacaaaaccctgtctctactaaaaatacaaaaattagctgggcatggtggtgcatgcctgtaatcccagctactcgggaggctgaggcatgagaatcgcttgaatctgggaggtggaggttgcagtgagtcgagatcttgccactgcactccagcctgggtgacagagcaagactctcagaaaaaatccccaaaatagaaaacctgtctccttaaactaatattgtttctctgacctactcatttcaggaaacaaaagactacaattgcctttatgctgatatgcccttatattgaagacttgaccatatataggaacattaaacagaatgccaggtagaggttttgattttcttgtcaaaataaaatgtcagaaatattcttcatgtgttttggggaagggagtattaataggggtcaactgtacattagtgaatacctgtcatttgaaataggagcttttaaaatagtatatatttaaggtgtaaaacatgatattttgatatacatatacatagttaaatgattactacagtaataggagcaataattttatgtgtgctgttctaagcacttatggtaactcattttatgttaacaacaatcctgtgagatgggaatatttatcctccatctgaaaaaaattaaggcacggagagaccaagttacgtgttcagggtcattaaactgatccatgtagaagccatgattcaaaaccaggcattcttagtgcccagcatggggtcaacactgacctgcttggctttggtacctctttaattgcattcgtactaagcactcagtcagtcataaccattctcttctcccttgtggtaattaatggtggtggtggtggagaatctacgggattaggcttcagttaattcttttttttttttttttggagacggagtcttgccctgtcgcccaggctggagggcaatagcatgatctcaggtcactgaaacctctgcctcctgggttcaagcgattctcctgccccagcctcctaagtagctgggattacaggtgtgcaccaccacgcccagctaattttttgtatctttagtagagatggggtttcaccatgttggccatgctggtctcaaactcctgacctcgtgatctgctcacctcagcctcccaaagtgctgggattataggcatgagccaccgtgcccggccggcttcagttaattctaaagcctgggactgtcagtaggattttaaatcttagagaccagttctgagaaagtgacctgttggctctgcattgcccccaggaaaagtgctaagattgttatcagttacctgacatctggtgggccggcacgccttagccacagtctcttgaatagtcaggaatgtctaaaaagttataagaagaaaaagcaacaggaagagacagacaacagataggtggttgccaggagtgggggaaggagagaatgggtagtgactgctggtgggcacagggtttgctttgaaattagattgacacaaattattattttccagtttataaaatcaggtttttcaggaggtctttacattgaatcacaagtgatttcaccctaatatggtgtgaattgattttattgttcactcttagttctttataaactaatttccccctccttgagtgtttgttttaaaattttggctctttcttgataacctggaatatatatatttggataattattttcaggaagagtatattatatgagtgatctcttttctgagttcttgttcagttgagaaggacttgattatgtacatgtgcagatatgggattctcagattttgatctttatgtttctccctgggaaagtttaagggttgatccattataatctggcttttagttttccagaggaaagggctaagtctgagattaacttgattcctcttggcccttccgaatatccatttctccttttttcctctttgtagataatcttttttgatttcttgtttttctgtaggattgaaaaatgtttttattaggctgtatttagatattggcatgttttaattaatttttccctatatactcaaaatctgtacatgttccgattcagatttttcttcagtttagaaaaatttccttctcgtatttttttgagagtgtaatatgtttaagaccacagactgaggagccagattgtttggtttccaattcctgttatgatactagtaactttgggtagggttcttaatcaattctttctttctttctttctttctttctttctttctttctttcttccttccttccttccttccttccttccttccttcctttcctttcctttcctttccttctttccttctttccttctttccttctttccttctttcttttctttcttttctttcttttctttctttctttctttctctctttctctctttctctctttcctttctttcttttctttctttctttctttctttctatccttctttctttctatccttcttcttcttttttttttttttgagacagagtcttgctctatcgtccaggctggagtgcagtggcgtgatctcagctcactgcaacttccacctcctgggttcaagtgattctcctgcctcagcctcctgagtagctgggattacaggcatgcaccaccatgcctggctaattttttgtatttttagcagagacagggtttcaccgttttagccaggatggtctgggtctcctgacctcgtgatccgcccaccttggcctcccagcatgagccaccacgcctgggctgtagttctttttattttcttcttgtggaattattttatttagattgcctcttttggatatgatctccatatttttctttcctcagcatttgtacttctttctttctttcttttttttttttttgagactgagtcttgctctgtcgcccaggctggagtgcagtggcacgatcttggctcactgcaagctctgcctcctgggttcacgccattctcctgcctcagccttccgagcagctgggactacaggtgcccgccaccacgcctggctaattttttgtattttttggtagagacggggtttcgctgtgttagccaggatagtctcgatctcctgaccttgtgatccacccgcctcggcctcccgaagtgctgggattacaggcgtgagcagcatttatatttcttaatccttttattctttctgggaaaattttttgagtttttaatcttttttcttttttttttttttctctttactgaagttctaatctggccagttctgctgttgttttcatattattttttctctgcaatttctccaaatcttagattgtttcctcatcataacttcctgctctagtttcttgtttgtaatcttctcttggattgtcctgagaacatcaattagaaattttataaacatgttttcctgtatcttatagtaaatctgtttctgaagaaattgtgcattcattgtttaggctagtatccataatttgaattatggtatttttttggacatcaactttgtcttctgctcatttttataagtgggaggtctctgccagcttagtattagtcttagcataaggtggaatttgagatgttttataacaaaggtagatatagatcatattaaatttttgatttaagaaaaatgaaaggtggcaatatttcttgaagccccaggaatgactgatctgggattcatattatcataaaagagaacaataagtgataaacattaatatttatttagctttttaaaatgtgccaggcactgtgcccagtgctttacatatgaattatatccttttctctttctcagcaactttatggtagatactgtttttcctgtaaacttaatgaagttgaagtttagagatttactcacctaaggtcataaggctcataaatagtagagccaggattaaacccaagtgtctgactccagcagttgagtgtcaaatagttaggttttaatggcctcttgtcaatatcccaaagggcttgaactcttataagtaggtttggttccagactgatacactgcccgatcttaatcatgatggtcagtagaagatgtgtttagatccctcttggtgaaaggagcccctgagtttccacgtaatacacttggaaaaccatagaatttgtttccttaattttgctcattcacaacccctctgtcacactgcttgattctctgtttcttaagcgtagcacaatacgtctgatctcttgtttttaaaatatctgttatgcctggacaacatggtgaaaccctgtctgtactaaaaatacaaaaattagccgggcattggttgcgggcgcatgtaatctcagccactcgggtggctgaggcaggagaatcacttgaactcaagaggcggaggttgcagggagctgagattgcaccattgcactccagcctgggtaacgagagcgaaactccgtctaaaaaaaaaaaatctgttatggtgtgtgttatgtagatattcttagagttctgggcatgtagctgacaccttttcatgaagtgcagaaaaacccattttatatgaatgtgttttcagaatcagccatagttcctgttacagaagatggacccaataattattggttgtgtgaatgttgtatgaattaaattagataaggagattacatagcatactcctctaaaatgcgcatatttaaagtagttgggtatatgtatcatgatcaactggaaaccttttttgaaatacagatgcttattatgacttagaaacactgttctaattatagtctaatatatagtgattattatagtctaataatcactgactataaaagtgattgaatagttcttggtaaataattgttacttttcttgatttttaaatattcatgctgtaatgataaaaatgtccaaatccatagtgtatatggtttagatcttgtttataatatacagagaaaggccttcaggagtttcttgaagtaataaatacattattgttgagttcattttggagttatttactgtactaaaccagcctcacaatgactttgcagatttgtgatattactcttggcttttagagagagaaggacacacagtaaataatccctaaattcaaggaattgacttaatgagaatagttgaatttttaagctctttggattctgagttagtatttagatttatttgatttaagatgattgttgaagttacatgaaaataagtctttccaaaatgaaaatctttttagtaatcaaatgaggattttctgatagcaacagggtgcattggaaatgagattttctgatcagcagcagcatgcattgcactgtattggggaattgaggtaaagtaatatttaaaagttcatattattggccgggcaccttggtcatcaagagtgagtgagtccaacaactagcaggtgtcttggcttgtgaggcgccccctccagcattaatgggaaaagagatgagggccagggccgggcatggtggctcacgcctataatcccagtactttaggaggctgaggcgggtggatcacctgaggttgggagttcgagaccagcctcaccaacatggagaaaccccatctgtactaaaaatacaaaattagccgggcgtggtggcgcatgcctgtaatcccagctactcgggaggctgaggcagtagagtcgcttgaacctgggaggcggaggttgcagtgagccaagattgcgccattgcactccagcctgggcaacaagagcaaaactccatctcgacaaaagaaaaagttcttattactgaggaaaattaaaaaattcagtgccttcaatataaacacttaaagttatgggatatgaaaattatggacatatcagacctgaattttatgttattttactcactcgaccagtaagatcttgagtcatatattttagtggaggcaattttattcatgtattgttttttttcttttttaagacagggtctcgctctactgcccaggctgaagtgcagtggtgtggtcttggctcactgcaacctctgcctgccggattcaagcaattctcctgcctgagcctcctgagcagctaggattacaggcgtatactaccacactcagccaatttctgtatttttagtagagatggggtttcactattttgaccaggctggtctcgaactcctgaccgcaagtgatccgcccattttggcttcccaaagtgctgggattacagatgtgagccaccatgcccggcccatacattgtttttcaattctaaaacattctgttttaaaagatcagttgttttgttcattatttccttaatagtggattccttcatgattgtgagagccaattcaatatctctaacggtcttttgaaaatcttaaatagggcaaattttattctgggtttccatgagtcaaaaatcagtgttgatggttcttgtctcccctccctcataatgtggtttggcaaaatgcttcagggaaataacagtgagggtgattgagggaaaactgaaaaatccatgaaggaagtaatagctattcttagaattattggctctaaaaaatactttcttaggttctctctagtcatgattactcataggaaacaaatatgaggtttatagatttaaatccaggtatttctttaaagagaaaataaatgttaaagaagtcatattcattgttttcattaagatttgagattttcgtaacaagttagagtaagagggaagtaaaaatcaaataagctaaaataggtacctgagatgtctttttcttccatgttagacagataatgtaccaatgctgtagcaaggtttgagggaggcacatctcatatgtgtgtgaaaacccagttatcatgcttatgaactacaaaaggatctatatgagttcttgtgtaggtgttagctaacaatctggtgttcctaaaatgtgaaacacatatatcttactctttggcaaattaacaaagtaagctggcataacagcttctattcttgacaggaaaattctatacctttttgtacttgattagtccattaggttattatctacagttacctgaatatgagtaaaaattaaaaagaaatctgtatatgaggtagagggatggctcctagaaaacatgtatatacagatgtttttgccataaacctatagaataatcatattttactagagtagatttaatcagttggggagattgttgaaactgcttccagaggtggcacaagttatattttgaaggttacaaattgtgttatatttagtttatgccactttgatacttctaaggtttaaattttctgtgcttttttgtttacttgacatttctgggattgagatcatgtttgtttcctgctatatttgttttctagtcacgttgaaccttgtttttctaataattatgctgcaatattatttgatacatacaattttagctatgttctcttgtccctgctggtattttgcatttatataaataacctttataggataaagtacagtgtcttttgttttgaaaaaagatgaaaaactttttcaatgtgtccccgtttggtttcagttatccacatctgaagtcactgtggctttgcctgtttaaacaagtttcttttcttgtcccttcagtagcaaccaccagggccgtcgttttacatgtcacttttctttcattcagaaagaggtgctcactttggtcgttaatttttgttttagtctgctcctatcattatggtagtttatagaaactattttttaattttagttttaatttttctttttttgcagagacaagagtctccctctgttgctcaggctggtcttgaactcttggcctcaagcagtaatccgtcgcaggctcccaaagtgttgaaattacaggtgtgagccaccacacccagtgtagaaattttttttttttttttttgagatggagtcttactcaagtgattctcctgcctcagcctcccgagtagctgggattacaggcacccaccaccacacccggctaatttttgtttgttttagtagagatggagtttcaccatgttggttagtctagtctcgaactcctgagctcaggtgatccgcccaccttggcctcccaaggggctgggattacaggtgccaccgcacccggcctagaaactattctttagctgtgatatgtactttattctatcatcatttattttatgtagatgctacacagtgtgctagagtctaaagggaatgtgtgcttgtatttttcttttttttgttaaactacctctcatgctattattgcttggcttttttttttcttttttttaattatactttaagttttagggtacatgtgcacaacgtgcaggtttgttacatatgtatacatgtgccatgttggtgtgctgcacccattaactcgtcatttagcattaggtatatctcctaatgctatccctcccccctccccccaccccacaacagtccccggtgtgtaatgttccccttcctgtgtccatgtgttctcattgttcaattcccacctacgagtgagaacatgcggtgtttgattctttgtccttgcgacagtttgctgagaatgatggtttccagcttcatccatgtccctacaaaggacatgaactcatcattttttatggctgctagtattccatggtgtatatgtgccacattttcttaacccagtctatcattgttggacatttgggttggttccaagtctttgctattgtgaatagtgccacaataaacatacgtgtgcatgtgtctttatagcagcatgatttataatcctttgggtatatacccagtaatgggatggctgggtcaaatggtatttctagttctagatccctgaggaatcgctacactgacttccacaatggttgaactagtttacagtcccaccaacagtgtaaaagtgttcctatttctccacatcctctccagcacctgttgtttcctgactttttaatgattcccattctaactggtgtgagatggtatctcattgtggttttgatttgcatttctctgatggccagtgatggtgagcattttttaatgtggtttttggctgcataaatgccttcttttgagaagtgtctgttcatatccttcgcctactttttgatggggttgtttgtttttttcttgtaaatttgtttgagttcattgtagattctggatattagccctttgtcagatgagtaggttgcaaaaattttctcccattttgtaggttgcctgttcactctgatggtagtttcttttgctgtgcagtagctctttagtttaattagatcccatttgtcaattttggcttttgttgccattgctttctgtgttttagacatgaagtccttgcccatgcctatgtcctgaatggtattgcctaggttttcttctagggtttttatggttttaggtctaacatttaagtctttaatccatgttgaattaatttttgtataaggtgtaaggaagggatccagtttcagctttctacatatggctagccagttttcccagcaccatttattaaatagggaatcctttccccattgcttctttttgtcaggtttgtcaaagatcagatggttgtagatgtgtggtattatttcttttgctgtgcagaagctcatgaatttaattagatcccacttgtcctttttttcctttattgtgattgctttgatgtcttcgtcatgaaatctttgcctgttcctatgtccagggtggtattttttaggttgtcttacaggatttttataattttgggttttacacttaagtctttagtccatcttgagttaatttttgtttatgatgtaaggaaatggtccaccttcagtgttctgtgtgtggctagccagtttatcccatcactatttattgaatagggagtcttttccccattgctcatttgtatatgatgtaaggaaatggtccatcttcagtgttctgcatatggctagccagttatctcatcaccatttattgaacagggagtcttttccccattgtttttgtcagctttgtcaaagatcagatggttgtaggtgtgtggccttatttctgggctctctattttgttccattggtctatgtgcctgtttttgtacccgtaccatgctgttttggttactgtagccctgtagtatagtttgaagttgggtaacatggtgccttcagctttgttatttttgcttaggatttctctggctgttcaggttctttttttggttccatatgaattttaaaatagtttttcctagttctgtgaagaatgttgtttgataggaatagcattgaatctgtaaattgctttaggcagtttggccatttcaatgacattctatccatgagcatgggatgtttttccatttatttgtgttgtttctgatttccttgagcagtgttttataattcttagtgtagagatgttctacctcgtggttggctgtattcccaggtattttgttctttttgtggcaatttggaatgggattgcctttctgatttggctcttggcttagctgttgttggtgtataggaatgctagtgatttttgtacattgatttttttttttttttttttaaagatagtgtatctctctgttgcccagagtgcagtggcactagagtgcagtggcacaatctcggctcactgcaacctccacttcccaggttcaagtgttcttgtgtgtcaacctcctgaatagctgggatttcaggcatgtgccaccatgcccagctaatttttgtatttttagtagagacaggatttcaccatgttggccaggctggtctcaaactcctgacctcaagtgatctgcccacctcagcctcccaaagtgctgggattatacgtgtgagccactgtgcctggcctgtacattgattttgtatcctgaaactttgctgaagttgtttatcagctgaaggagcttttgggctgagactggggctttctagatatagagtcgtgttatctgtaaacagagatagtttgacttctactctttctgtttgaatgctctttcttactcttgcctaattgctctggctaggacttccaatactatttttaataggagtggtgagagagggcatccttgtgttgtgccggtttttacagggaatgcttctagcttttgaccgttgagtataatgttggctgtgggtttgtcatagatggcttattattttattccttcagtacatagtttactgagaatttttaacatgaaggggtgttgaattttaccagaggccttgatatggtttagctctgtgtccccatccacatctcatattgaattgtaatccccagtgttaggggagggacctggtgggaggtgattggatcctgggggcggatgtctcccttgctgttctcatggtagtgagtgagttctcacaagatctggttgttctcacgagatgtggagtgtagtacttcccccttcactctctctctctttcctgctcctccatggtaagatgtgcttctttgcccttcgccttctgctatgattgttaagttttctgaggcctaccagccatgctttctgtacagcctgtggaactgtgagtcagtgaaatctcctttcttcataaattacccagtcatgggtagttctttatagcaatgtgagaatggactaataaaggccttttctgcttctcttgagataatcacgtggtttttgtctttagttctgtttttgtgatgagtcacatttattgatttgtgtatgtttaaccaacttcacatcctggagatgaaggctgcttgattgtggtggattagctttttgatgtgttgccggattcggttttcaagtattttgttgaggatttttgcgttgatgttcatcaaggatattagcctgcagttttcttttattgttgtgtttatcaggatggtgctggcctcatagaatgagttggggaggagtccctcctcctcagttttttggaatagtttctgtaggaatggtaccagctcttctctgtagatctggtagaattcagctgtgaatccatcaggtcctgggatttttttggttggtagacgttttattactgattcaattttggagcttgttattggtctctgtggggaatcagtttcttcctggttcagtcttgggaggacatatgtgtccaggaatttatgtctcttttaggctttctagtttgtatgcatagaggtgtctgtagtagtttctgatggttattttttatttctgtggggtcagtggtaacatttcctttgttatttctaattgtgttctctcttttctttattactctagctagtggcctatgtatcttactaagtttttcaaaaaaccaactcctggattcattcatcttttaattgttttttcttgtctctatttacttcagttcagctctgattttgaatacttcttttcttctggtagctttggtgttgatttcttcttgcttctctaattctagaaacccaatttaaactaatttgtgcaaaaataatttgttgaaaggaatattttagggaaataaaaaatggaagatttattaagactgaggatggggacaattggagctaggcctcaggaatgactcagggatatgacttggttaagaccctttttcttgtctccgtctagggtttacttttctctctcactgcacactgtcattcttcattgaggaaaaacatggctggtcactagtccaaaaatcttagaaattggattaattgatctagcttagattcatctatttggctgtggggttgacatttttataaaagctatgtggtttaagtagagagaaggcttattcgcagaataagatgtttgagaattattgttggacagataaaaataggtatccattaaagtaatgtgaattaataaagttcttttgtccccttttcagagctagagacatacttgtgtacatgcatacatattggtttggttcttgcttgggaactagagtagtggatagactgtttagtaaacaaaagtcatggtaattttttcctggattggctcagtttttcaaagcacagaagaattttggttggcaaatgttgttctataaagtatttgtccattttcttagtgtaagttaagaatagttccctttctacttttgttatggatctcctacagtcattctaattctaatgcctgatagtctttgcagcctatccaatcttgactcacccttatatttttaggtttctattttagctcaggagccacttgaaaatgagtaggcacaaacacgtgatctaaaagcaagaaggaggctaaccacatttggcactgaaggaaattagatcacgtgcactgtgattgcacactttcgaatatgttacgttattttgggaagaaaatagctttcagttagacattgctgaatattgttgtactatttcttgtatatgtgaaaattgtagttttaggcatccaagtgaggtattaatttagatatcattattgctcatttagcaaaaatgatgtggcattaaagtaagaattataagctatttcactggtagaattgctgtaggtatgggggagaagtgtgtctttaagtgatttaatttaatctaaatatttattgagctcctttgagtttagaaggggatggatagaagaaacaaaacactgatacataccagattttctataatgctgataagcttctgttccttatttccgtatatctttaaaatgccctgaaagtgaaaatatttatgcctatatttccattattttttgcacctgaagaaacataaaaatcttttgtcagattttatattctgatttttagattgcaacagagcagtcttaactaaatgcattttaaagcagttttgcatttgtacactgctctgtagtacatgctgcgttgaaatggatgtattagtctgaagttcactagaacagtgagcttcatattatttaaaagacctctgagaatattccagctgttatttcttttgatttgaaataatagcagattgccatacataaagacaaagttaacattttgttatagcacactgctgcataatagtagacttagtaaattatattttgaaaggacgttttggaatgtaggtcaggagctgactggattcttctggaaatcacatagcatgagaatcttgagtcaagtcagtacttgactttagaactcatgcagtccaacttcctacctgatgctggaatccatcttgctatcccaaataattcatttggttattaaagaagtatttattgaggcatagtgtgtgtagatactgtcctggggatgtgttggctaaaataaaaatagacttggtccctgcccatgtgcagataggtcttttttagaaggctattaattattgttgattcagtttcttgaaaaatataggggtattcaagttatctgtgtctcctggtgtgaattttggtactttgtgtcttttaaggaactggtctccttcatctaagtggccgaatttgtggataaagagtctaacttgtagttgggtgttcagtgctcaatcagtctcaacaagttattttttgaatcaagtactcaagttgggaagaattgacaatttaacaactttgaatttcctaatccatgaacattgaatatctctacattaattagatctgatttaatttccttcctcagtgttttttagatttctgcttacagaccctatgcatattttgttagatttatacctaagtatttcaatttttcccttgctattgtaaatgatactgcttttctaactttcaaattcctattgtccattgtatgtagggaggatagtgacttttgtatattgaccttgtatcctccaaccttactgtacttgcttattagttctgagggttttttttttctctttttgaatctttaggttttccacattgacaatcatgtaatctgtaaataaagacagtttgatttcttcctttccaatctgtatacgttttatttcttccaatcttagggggaaagtgtctgcttcgtgattattaagtgtgatgttttgtaaatttatttattggaggaaattcccctcaattgctagtttactgagagtttttgttttgttttgttttatgagtggatgttggattttgtcaaatgcatttcaattgacatgattatgatttttctttagcctattgatatgtagggtgacattgattggtttttgaatgttgagccagtctttcgtacctggtatataattcttttaatacattgttggatatggttttctaatattttgttaagaatttttgtattaatgtcattatagatatggatgtatagtttttcatttttcttgttatctggttttggtattagagcagtgctgatctcacagaatgagttagaaagtattacctctgcttctatattctggaagatattgtggaaaattgatattatttcttctttaaatgtttggtggagtttaccagtgaagtcatctttggtgcttcctttaaaaatatagggctattcagtttatcagcttggccatagtggggtagaacagcagtccccaacctttttggcacaggggaccagtttcatggaagatggttgttgtccacggaatgggggctggatgaaactgttctacctcaaattatcaggcattagttagattcttgtaaggagcactcaacctagatccctcacatgtgcagtacacagtagggttcacactcctatgagaatctaatgccactgctgattggatgtgaggtggagctcaggcaataataatactcgcttatgcattgcgtacctcctgctctgtggccttgttcctaacaggcctgggaccagtatcagtctgtggcctgggggttggggatgaggtagagcacaaagtggagtctttgggtccccttttccaggccttggctcttagatggtatttctggacctgccctggaccagaggggagccctctgccctgaggaatgagtcccaggccagccagcattcaccagaaactgactgaagagcccttgggccttaagggaacatcggcagtagcttggaagtataccaaatgggcctgtgttgtgggtggccacaggataaggctcctctgcctgtggaaacgacagggatgagtggaagaattgtgtcttgtggtttgagtgccagctcatctgtagcatagtagaatattaggtagacttctaggtttttaaactccagtccctggctcccagatgacacttcttgacccacctggggcccaggggaacttgttgccctgaggggaaggacacaaacctggctggctttgctacctgttgattatacagcatcaagaccttgagctgccataggcggtagccaggtagtgcttacagcaggcctttggtgagacacagtgctgtcctgactttaggtttgactcagtgcagtttcagtggtggtgaaacaggagtcttgtgtcactctatcctcagccccaggtggcacagaacagagagggagattccattggtttgagagaaagtaagtaaagagaataaaagtctctgcctggtaatcaagagaattctcccagatctcttacgcaagaccgtcaaggtgatacctttgtgagtctgcaagatccacagtgttactgggtttggatggagtgcccctaatgcagatacagcttagatcacaacacctaagtccttttgaatgctaggaaagccttcccaagaagatgggtacaaacaagcccagactgagaagactacagtagatacctaactcttcaatgcccagacgcagatgaacatcgacaagcatcaagaccattcaggaaaacatgaccttaccaaaggaactaaataaggcaccagggaccaattctggagaaagcgagacagaaaattcaaaatagctgttttgaggcagttcaaagaaattcaagaaaacacagagaaggaattcagaattctatcagatatattgaacacagatttaaataattaaaaagaatcaagcagaaattttggaattgaaaaatgctgttgacacactgaagaatgtattgaagtcttttaatagcagaattgatcaagccgaaggaagaatttgtgaacttgaagataggccatttgaaaatacacagaggagacaaaagaaaaacaaaacagaacaaaaacaatgaagcatgcctacaggatctagaacatagcctcagaagggcaaatctaaaagttattggccttaaagaggagatagagaaagatatgggtagaaagtttattcaaaggggtaataacagagaacttaccaaatctacagaaagatatcaatatccaagtacaagaaggttatagaacaccaagcagatttaaaggaagatgatgtctgcctcaagacatttaataatcagacttccaaaggtcaaggataaaggaaggatcctaaaagaagcaagagagaagaaacaaataacatataatggagctccattgtgtcagacttttcagtggaaaccttatataccagaagagagcagcaggacatgtttaaagtgctgaaggaaaaaacttttactctagaataatatgtttggtgaaaatatcctttaaacatgaaggagaagtaaagactttctcagacaaaagctgagggatttcatgaacaccagacctgtcctataagaaatgctaaagggagtacttcaaccagaaagaaaagaacgttaatgagcattaagaaattatctgaaggtacaaaactcactggtaatagtaaattcacagaaaaagacagagtatggtaacagtaactgtggtgtgtaaactactcttgtcctaagtagaaagactaaatgatgaaccaataaaaaataataactgcaacaacttttcaagacatagataatcaaaaaagatataaatagaaacaagaaaagattaagcaggggataaagttagggtgtagtgtctttatgagttttcttcttgcttgtttgcttgcttatgcaaagtgttgttatcagcttaaaataatgggttacaagatagtatttgcaagactcattgtaaccttaaatctaaaaacatacaataagtacaaaaaaattgagaagcaagaaattaaatcatgccatcatagaaaatcaccttgactaaaaggatgacagaaaggaaagaaggaagcaaataccagaaaacaagtaacagttataggagtaagtccttacttatcagcaataacagtgaatgtaaatggattaaactctccaatgaaaggatacagagtagtggctgaatgtataaaaaaccaagacccactgatctgttgcctacatgaaacatactttacctgtaaagacacacatagactgaaaataaaaggatggaaaaagatattccatgtcaatggaaaccaaaaaggagcaggaatagctatacttctatcagacaaaattgattttaagacaaaaactattagaagagacaaagaagatcactgtataatgactaaaaggtcaattcagcaagaggatataatgattgtacatatatatgcacctaaccctagagcacccagatatataaagcagatattagagctaaagagagggatagacccaaatacgataacagctggaaacttcaacacatcactttcaacattgaacagatcttccagtcaaaaaatcaacaaagagtaatcagacttaatgtgccttatagaccaaatggacctcatagatgtttatagaacatttaatccaatgactgaagaatacatatttttttcctcagtacatggattattcttaaggatagaccgtacttaggtcacaaaacaagttttaaaacatcaaaaaaagaaataatatcaagcattgtctctgacgacaacagaatgaaacttaggttggtgcaaaagtaattgtggtctttgccgttaaaaaggcaattacttttgcaccaacctaatagaaatcagtaacaaaaggaattttagaaactatacaaacacatggaaattaaacaacatgctcctgaatgaccagtgcatcaatgaagaaattaaggaggaaattgaaaaattcattgaaacaaatgataatggaaacagaagataccaaaacatatatgatacagctaaagcagtactaagagggaaatttattactgtaagtgcctacatcaaaaaagaagaaaaacttcaagtaagcgacctaacaatacttaaagaactagaaaaacaagagcaaaccaaacccaaaattagtagaaaaaaagaaataataaagatcagggcagaaataaattaatttgacatgaagaaaataatataatagatcaacaaaaccaaaagctggtggtttgaaaagttaatgaaaattgacaaacccttagccagactaagagaaaaagagagatccaaattaataaaataaaatcagagatgaaaaaggaggcattacagttgatattgcagaaattcaaaggatcattagtggttactatgagcaactatatgccaataaatgggaaaacctagaagaaatggctaaattcctagacacatacaatctatcaagattgaactgtgaagaaatccaaaacctcaacagaccaataacaagtaatgagattgaagctgtaatgaaaagtgtcctagcaaaaaaagcctgggacctgatggcttcactggtgaactttcccaaacatttagagaactaatcaaatatattcaaactattccagctgggcatggtggctcatgcctgtaatcccagcactttgggaggctgaggtgggtggatcacctgaggtcaggaattcaagaccagcctggccaacatggtgaaaccctgtctctactaaaaatacaaaaattaactgggcacggtggtgcatgcctgtagtcctagctactctggaggctgaggcaggataatcacttgaacctgggaggtggaggttgcagtgagccgagattgtgccactgcactccagcctgagcgacagagtgagacttactcaaactattccaaaaaatagaggagaagggaatactttcaaagtcattctaagaggctaatattaccctcatacccaaccaaagacacatcaaaaacaaacaagtaaacaactgtaggctaatatctctgatgaatatcgatgcaaaaatcctcaacaaaatgttaccaaacaaaacacaggaacacattagaaagatcaaattgatcacaatcagtgggatttatcccagggatgcaaatatggttcaacagacacatatcaatcggtgtgatacatcatatcaacagaattaaggatgaaaaccatatgatgatttcagatgatgatttcagttgatgataaaaaagcatttgaaaacattcaacatcgcttcgtgataaaaacccttaaagaactgggtaaggaagaaatatacttcaacataataaaagccatgtatgagagacccattgctaatatcatactgaagaaggaaaagctgaaagccttttctctgagattgataacacaataaggatgcatactttcactgcttttgttttcagcatatactggaagtcctagctagagctatcagacaagagaaagcaataaagggcatacaaattggaatggaaaatgtcagattatccttgtttgcagatgatatggtcttatatttggaaaaacctaaagactccaccaaaaaactgttagaactgataaacagatttattaaagttgcaggataaaaaatcaacatataaaaatcagtagcatttctatatgccaacagtgaaaaatatgaaattgaaaccaagaaagtaatcccatttacaatagctacaaataagataaaatacctaggaataaaccaaagaagtgaaagatctccacaatgaaaaccataaaacattgatgtaagaaatcagagaagacacaacattggaaagatattccatgttcatgggttggaggaaccaatattgttaaaatgtccatacttacccaaagcaatctatagattaaatgtaatccatatcaaaataacaatgacattcttcacagaaatagaaaaaaaagtcctaaaatttatatgaaactacaaaagacccagaatagccaaaactatcctaagcaaaaagaacaaagctgcagcaatcacattatttgcttttaaattatgctccatagctatagtaaccaaaacagcaaaaaccagtactagcaagaaacacatagaccagtggaacataatagggaacccagagataaatctgtacatctatggtgaactcagttttgactaagctgctaagaacataacactggggaaaggacagtctgttcaataaatggtgctgggaagaatggatatccatatacagaaggatgaaactggacccctgtatctcatcatgtacaaaaacaaaattaaaatacattgaagactcaaatataagacctcaaactatgaagctactaagagaaattattgggaaactctccaggacgttggactgggcaaagatttattgagtgataccctaaaagcatgggcaaaaaaagcaaaaatggacaaatggtatcacatcaagttaaaaaggtatctgcacaacaaagaaaacaatcaacaaagtgaagagacaacccacagaatgggagaaaatattttcaaactacctatctgacaagggattaataaccagaatatataaggagcgcaaacaactctataggaaaaagtctaatctaattaaaaatctaatttagattgggtgcagtggctcacgcctgtaatcccagcactttgggaggccagggcgagtagatcacctggggtcaggagttcgagcccagcctggccaacatagtgaaaccctgtctctaccaataatacaaaaattagctgggtgtggtggtgcacacctgtaatcccagctacttgggaggctgaggcaggagaattgcttgaaccagggaggtggaggttgcagtgagccaatgttgcgccattatattccagcctgggcgacaagagcgaaactccatctcaaaaaaaaaaaataataataataaaataaaatctaatttaaaaatggacaatagatttgaatagacatttctcaaaagaagatatacaaatggcaaaaaggcatatgaaaaggtgcttagcaacactgatcatcagagaaatgcaaatcaaaactacaatgagatattatctcaccccaggtaaattggcttttattcaaaagtcaagcattaacaaatgctagtgaggatgtggagaaaaggtaaccctggtacactgttggtgggagtatgcattagtacaagcactatgaagaacagtttatatgttccttagaaatctaaaaattgaggtttcacatgattcaccaatcccactgctaggtatatactccgaagaagagatatctgcactcccttgtttattgcagcactactcacagcagccaagatttggaagcaacgttaagtgtccatcaacagataaagaaaatgtatacatatacagtggagtactattcagccataaagaagaaggagatcctgtcattttgcagcaacatggatgaaagcagatgtcattaggttaagtgaacaggcacagaaagacaaagttcacacattctcacttatttctgattgctaaaaattggaataattgaactcatgtagatagagaattagaacaatgattaccagaagctgaaaagggtagtgggaaggtgggatgggtaagggacatggggatggttaataggtatgaaaaaataattagaaagaatgaataaaacctagtatctgctagcacagcagggtgaatgtagtcaatttaattggacatttaaaaataactaagagaataattgaattgcttctaacacaaaggataaatgcttgaggtgatggatactccatttgccctgatgtgattattatgcatttcatgcctatgtaaaagtatctcacataacacattaatatatacacatgtacccacaaaaattaaaaataaaggagtaaaaaagtaattttttaaataattttatactgcatgtaacccatgtacaagtagtgccattaccttgtaacaggatatttccaattcctccctctctccccctcccctttttttttttgccattgctgtcatgttttttttttttgtccatgtggtataatcatccaatacatttattcttccttttatcacatagatccacatttttgacctatataattttctttctgtctgaagaactacttttaatctttctttcaagccagatatgctggcaatgatttttcttggtttttgcttgttttggaacttgtgtgattaaggaattataatgagaaagtgatgggggcaagggtgtattgggccttgtaagtcttgggaagcagtttgaattttatttaaattttagtgaaaaggttttggtctggagttttcatgtaatctaatttattttccgaaaaaaaattaaataaattggcagctttgtgaacaatgacgtagattgagggaagaagactggaaatagaagatgggttaggaggcttttacagtagataagagcattgtttggactagagtggtagtagtagtagacagaaaaatggatagatgtgagtcttattttggaagtgggtctgacatgacttgctgatgtgaggagtaaagaagtggaggtgaatcaaggatgatatccaggtttcgtgttcaagtaactttgtagaagatagtggtgttatttactgaaatggcaaatcgggactggaaacaagtttggaggagacattaggaattccattttggtcatgtttcatttaagatacgataagacttccacatggaaatatcaagtagagaggtgaatttcagggcaggaatttagagaaggtatttgagttgggatagaaatttggaagactgttagcctgcagatggtattttcgtccatgacaatgacagacattacttagagtgtgtgacaagggaaaaggtcaggatctgaactcagggaatttctaacatttagaaatcaggtagaggagcagcaacctgagaaggacttgaaggattgaccacagaaagacatctggaatatgtggtgtgttggcagttaaggattcatcgtgcagtctggaagagtaaagacctggcttgtaacacattctgcatttttagaaacaaaatatacaaagtgagaaaaaaaccttcagaggacagatgaatgtcgcttgggttttaaaaaggaagggtgttaacatgcataacagaaataaatgatggctagctaattacactggtccaggagtatggttattctttattttgatattcttgaaatttttgattttttataaagttggaaagtaattactttttaaaagatacacatgtaacttgaagctagactcattctttttattgccaagagtaatggtgttagtgtcacctaatggcaaaatggaatattgcagctatacttataggctataatgaaaaggtaacctaattagaaagaaaaataacatttctggggggattttaggcatggatcagtagacttactatggcttacaaggtcccgtgttctttagccctagcctgcttgtcctgcccctctatcacattactcatttggtcactgagcagattgtgtaatagtagggttcttttttgtctttcaggtttaggctcagatattttcctctcagagagctttttcctaccaccttaatttgtccgtatacttcccatagctactgtttgtcacattaacgtgtttattgtttgcatagcctttagagtgacttggaatcaccatttgctccctttttatttgttttcttactagtatgtaagccccagaagtgcaggctacttgttttccttattcacttaggtaacctcagggctgagttgtgtctgttatatagtgtatgtctgcagttaaacttagttgtgtgagtacatgaacttctggatatgatagtgagtgttgtttctatgctgtagagatctatccagaaaacagaattacactgtgtttgattactgaaacattatttgctacgtgaaggcaatatagaagcttttttctttttctttttggtgttaataagtgataatgtgtcaggaaagagaagctatatgtcttaggatgttgaattctgtattagtcaactttagttactcagaaaaaatatttgcaggtacaatattcggtcttgaggagataagtttttttttgaagcatttagatttaattaatatagcagtgtcagtgaatatggttttgtgtctgtgtgtgcatttgtaggtatttctagtatcatttaattatttcctctattaaaaagaaaacagtatttctaagagaaatgagagtgagtgtgtcaggtaaacagtgataaatctggttgagatatggactggtttgtgtaaatttttaggtaacaatatggctctattagtctggaaacttaggatgaagagagagtacatttccattaagtggctcagtccaagaaggtagcctccctaactttgagataattatctagccagcaggattcttcttcacataaaccatttttaaagctttattagttcatgtttttaattagttcatgtttttaatcagtaggtttttttttttaatcccttttgtttttccaggtggttgtgggaagagaagtttgcagaactgaaatggaggtcagagcttcattacagaaggttagtggatcatctgattctgtggctacaatgaacagtgaagaatttgttttggttcctcagtatgcagatgataattctacaaaacatgaagaaaaacctcaactgaaggtatttttttcttttctacatatggtataatttttaattaaaaactatttgaaacttaggagatgtgtaaaatgcaaaggtttttctcaagtgctgactttcaaaataaaatcaatgtttgatttatccagaccctaattatttggtttgtgtattttaaaaagttcttgcttttggttgtttaccttttgatttggaattttagggggaagaataaaagaagaaaaagaagagaaaggattttttggtgaattagacataatggttaaattttacattactttatctggatgtttttgtttctcttactgctgggttttagaagttaattaaatgttttgctttcacttgagagacttttttctttatgatttttatgttttaaatcagctggtaacgttccgttgtgtgatttaacagtcgacttgtctaaatgtttttaaagcatatcttatatttttagcatttgagtttttatttagatatggtccctttttcacttctgtgttgcactttctaagtcaaagaaaaggaagcaagtaaactcagttatataggcttgaaaatggtataactgtcttctagaaacaggaataggaaaagtagttaaaagtgctatatattacttatgacttttatttagtattaactatggcatcaaaagtgtattaatatatcagtctaataaaatatattctgaaaatgagattactaaatgtttatgttgagaatatattgttttataattttatttaaataatcagtggctttatttttagatacctgtattttagcattattgtgtttaagacatcacttatttgcttaggctttgtgtttcacctgcctttgagaaaactatgagtcaacttaagtgtaaggaaattagcaatattcatcttgggagctagccaacaatttgtaaagaaatcagaaatatggttatgctgtgctaacaagaaatataaccttttaaatgatattcataatagacccgatttaaatttacctattttttcctttagacatgtaaatttaaggttatctgatttttagggtgtgttcctaaaaaagaaaaagaaaaagaagggccaggcgtggtggctcatagcctgtactcccagcactttgggaggccaaggtgggcagattgcttgaggtaaggagctcaagaccagcctggccaatgtggggaaatcccgtctctacaaaaaatacaaaaattagctgggtgtggtcgtgcacgcctgtagtcccatctacttgagaggctgaggcatgagaatcgcttgaacccaggaggcgaagtttgcaataagctgagattgcaccgctgcattccagcctgggtgacagagtgagactctgtctttaaaaagaaaggggaaaaaaagataaatacatctctgtaaataggatcttatataaaatgtagttggaaactgtcttaagtgttttataaagaatccttttgtgaaactaataatcttcctctaatttagttttataaccaggattttaatgtattatatatgtgaaacaacttcttagtattttagtaactatatttaaatatttagattgttttaatttcttctagaaatgaaatactttcataaaatttagcttcagaactatggtagaattgaaacagaattgtcttgctgtgtctgtagatagtttctaatggtgatgaacaattggaaaaagccatggaagagattttgagagattccgagaaaaggccaagcagtcttcttgttgattgtcaaagttccagtgagatttcagaccattcgtttggagatattccagccagccaaacaaataagccatctcttcagttaattttggatccgtctaacacaggtactgtattgaattcttagaaactattaaagaaatgggataaagtaatagtgaaaattttaagatgaaaatcagaaaaaattgttagctcttctcaagctttcagttcttgttgagagtttccacttcggtgttatgtttctgcctatatctctgcctataaaaatcaggtcttaatgttctttgggaacaaagactatgtctgggtcctcattttacccctagtacttcatgcatggtaggtcctcaacagatacttactgaacaaatgagtaaatacttgggtgtcacagaatagtgtaatggagatagtctttcatgtgatgtgcctttttgctcagtttcactacacttatttaaagttatatttagtaaaaactctaagtaaaacatatcaattccaacagtgtattaaataataaatacatctatgaataattaggatttgtactttgaatactagcttataagtcaagatgcttttgggtgcaaaaataaataaaaccaaaaccagctccaacttcagctggcttaaacaccacaggtataatttgatctaggctctgatggtgtttttttggtaactactcagctctgatcttgtctatgttacctttctccttagctggttacaaagtagctaccagcagaaactggtaggtaagggaaggtgacctgtttgtgcctggtggcaaagagaaagtcttcattcttttactgatttttaaaatttctttggtgacacgatctcattctgtcatccaggctgaagtgcagtgatgctgttcagccttctgagtagctgggtgtgtaccaccatgcctagctaattttttttttttttttgtagtgatggggttttgccatgttgaccaggccggtcttgaattcctggcttcaggtgatctgcccacctcagcctcccaaagtgtcgggtttaccagtgcaagccattgcacccatccctggcctgttttacggattaaataaaagttctgagttttactctgattggaccagtgaaaccattttctagtagtgagggaaatgacatgaactgatagctgtaggcctgggttacattcaaacctgtaaataagtcactctgacagaggggatgggattatcctaattggcttaggaaactcgtgattcatttctgaaccaaatgaaccttggtacagggtaagtataggtatagccaaactgttacacaatagggctgtgatgcatttatgtagggaatgtaatcacagtgccttccatggcaaggatgattaagcattagaaaaatctttcagtgtggtttaccacataaagtggtgaagagtgaaaaagtatcagtagataaagaacaagcactggataaaatttaaaattttacatgtatatgcacatgtaaagttcttggaaaacttagaaggaaacttgcttaatcaaatatctatcaaagtcttatgttttatgctgaaatttaaaatgcgttaccatcaagatatattgaaacaggagcagttagggcatgatagctatcaccatagctctttgacgttgtactaaagaatccagccaatgcaagatgacaggaaaaagaaatgaagtgtgattagaaaaaaagtgaaaaaattctcatgattggtaaagtatttaagaaagtgaatggataagctattagatttaaagactttttgccaggcatggtggctcatgcctgtaatcccagcaatttgggagggtgaggcgggcagatcacttgaagtcaggagtttgagaccagcctggccaacatggcaaaaccccgtctctattaaaaatacaaaaatggctgggcggggtggctcaagcctgtaatcccaccactttgggaggccaagatgggcaggtcacgagatcaggagttccagaccagcctggctaatatagtgaaaccccgtctctactaaaaatacaaaaattaactgggtgtggcagcacatgcctgtagtcccagctactcaggaggctgaggcgagagaatcgcttgaacctgggaggcagaggttgcagtgagccaagactgcaccattgcactccagcctgcgtgacagtgagactctgtctaaaaaaaaaaaaaaaaaaaaaaaaaaaaattagctgggcagggtggtgaacacttgaaattccagctgctcaggaggctgagacagaaaagtcacttgaacccaggaggtggaggttgcaatgaactgagatcatgccactgcactccaacctgggcaacagagtgagactccatctcaaaaaaaaaaaaaaaaaaaagatttaacgacttttaggaaggttagcaccaacagtagaaaataaaattgccattcataataccaacaaaaataataggtaacaaggaagaaacaaaaatttatgtaaaattttaataaaattataaaatgttattgaaggaaatgaacacctgaatgaatggggagagatgccatgttgattgataggagtcaaccttgaaaagatgtaacttatctccaaattagtctgtaacttgggtgggaatttcaaattttcagttatttttataaacattctgaaatgtatctggacaagtagaggtacacaggtagctaagaaaatttttaaaaagaatattatgtattaagatagactacagagttacagtgattaaaccaatgtgatattggcttgttatagaagtgaatcactagaacagggtaccagaaacaaacctatgtatataaaggatttcagtatatgacagaattcgcttcacataccactgggggaaatggtaactatgcagtaaatagtgttgggacagttgcatctttgagtgcaataaaataaaattaggttccttagttgtacataaaaattatttttagtgaatcagatatttaaagtgagaaataagcctgtaagaagaaaacaatggagcatatttttgtgattgtcaaggtaggaaaagccaaatcacaaaaggaaaagatagttgcatatcattatagaaaaatttaagtctggcctgggcatggtggctcacacctgtaatcccagcactttgggaggccaaggtgggtggattacttgaggtcaggagttcaagaccagcctggccaacatggtgacacccggtgtctactaaaatacaaaaattagccgggcatggtggttcatgcctgtaatcccagctgagaatctgggcaggagaatggcttgaacccaggaggcggaggttgcagtgagccaagattacaccactgcactccagcctaggcagcagagtgagactccatctcaaaaaaaaattttaaatctgagtgcaaaagaccatttaggttatctatttcttcttgagtgtactttggtgttttcatctttcaagtaattggttaatttcacctaagtatggggatagagttgtttctctgttatagagtaatattctcttattatccttttaatgtctgcaggatgtgtattaatatcctctcattcctgatattgacatgtattacatatacatacattgaaaaacctaccagtctaataattttgctttcaacagccatacgtatatttccttgagcactttaaaaatgcttttccagtgtcttcttgtctccattgtttctgataacaaatctgaagggatttgaatcattgttctcctatttgtaatatgttatttttctttgctttcagtacttttatttcattgttttcagcagtttgattatctgtgtgtggttttctttgagtttatcttttttttttggatcactgagattcttgaatctgtaaatttatatctttaaccaaatttgggagttttcacccattatttcttggtaattgttttgtttctacactaatctctttcttttctgggactcagtagacaaaaatggtagacatttccataccgttctcacaattccttaggctcttttcattgttttccctgtgttcaagctcactgactttttactttgttaatctccattctgctattgagatcgtctgatgaatttttaattttagatattgtatttttctgtttttaaatttacattgttttttaaagtttttttgtttctctgtggatagttttgatatttttattcattacaggtgttttcacgtttattttatggattatttatggagcaactgggacatcttgggattggtctgtggattattttttcacttgagaatagatcacccttttatgtttgttgagtaattggcttgttcccagagttttcgaatcttatgttttgagactatttcttgttaaaatcctctgaagaatgttgactttttttttttttttttttttaaagcagacattccacctggttgtgtccaaactgcaagatctgtcttgctttctggttccaaagtattttcaattctcaaaacctttgctgtgcttcttcagtctgttccacatgcatacacagtttgctagtttacacgcagagttaggggattatcttcttcagctctctcctctctgagatttccccacactctctggcttccttgggccattttccttctacccctgtgttagaaagacaggtttctttcttagagtttttgctgctttgtgctgttttgcagaatcatatgtctggagcactttatgacaaagtggtgagagaaaagagagggaaaaataatagagtttttcttttccatttttgggttataggggcctctttgctttggtattttagcctttgagacacatttcttttcctccagattgtagatgcttacagtaccaccgcgactaccagcatttcaggtagttctgtggtcggggctagtggtagaactgggagagaaaacaaaacagaaacaagtcatgatttctcagatactctctagtttgcagggacttctttttctgttatttggctggaaagattggatttctttgttttgttgctcactgctattctgcaactcggaccacccttaggtcaaaactgggaggtgatgatgagaaaaatggaaaactcaccactgtaatagaggttcagattttcactttcctctccactctggctgttcctatttactttttaaaaggaggctggatgtggtggctcacgcctgtaatcccagcgctttgggaagccaaagtgggcggatcacttgagctcaggagttcaagaccagcctgcgcaacatagcgaaacccaatctcaataaaaaaagaaagaaagagtcctccggtcgttgctttttatattctgtcgaaagttttcaggtataatctgtgggagagataacttataacagtaggagagataaattgtaacaggcttatcacttcaatttcactggtccagttcaataatcttgagtctgtttttgcttcagctgttttgaagttctgctattaagggcatagtcacttagaatttttgtgttttcttaatgaattgaccattttagccttgtgaaatatccgttttctttttgttaaaattccttgtcctgaagtctagtttttcttatattaatatagccacttttggtttcttatgattagtatttgcatggtatatatttttctttttcctttttttttaaaaaaaattttcatctatttttatctttaaagagtgtttcttgtagatacctttttaaaatccagtttaacaatctcagtcttttagttgggtttagactaggataagtaaactactatctgtgagccaaattccacttcctacttgtttatggtgtggcttgcaaagtaaaatggtttttacatttttaaatggctctaacatatcaaaaggagaataatattgtgacacatgaagcttatatgaaattcaaattttagtatccataattaagttttaagttttgtcaaaaaatctgtggaaggtttttttctcacttgtataaatacttgcataatattgtagattttgtctcttggcccaccaaacctaaaatatttatcatatgaccctttacagaaaaagctgaccatttacttttttttttttttttttgagatggagtttcactcttgttgcctaggctggagtgcaatggcacgatctcagctcactgcaacctccacctcctgagttcaagcaattctcctgcctcagcctcctgagtagctgggactacaggtgcatgccaccatgcccagctaatttttttttttttttagtagagatggggtttcaccctgttggccaggatggtctccatctcttgacctcatgatctgcctgcctgggcctaccaaagtgctgggattacaggcatgagtcactgcgcccagctgaccatttacctttgatgtaattttaaatatatttggatctaagtgtacttactctcttgctgtttttctctgtctcttctgttcttgtttttcccctcctttcctgcctttagattatttttaatgttctattttatctccattattggcacattagctatataattttgtcttattattttagtatttgctctggagtttataactcaagtctttaactcatttacattctaataatgtcataacactttatgtacattgtaaggatcttttgttaccttctagattttatgcttctgctctcattcattttgctaatacatatgttagaagttctacaaaatactgtggttttttttttttttgctttagtctgttatattttgaagaaattaaagagcaaggaataggtctttttctcatatttaacttctcgtgctcttcagttttctatcattttcctgtagcccaaggaacttcctttaacattcctcttctgcaatttagaaactgctgttatattcacctggggaatattttactgcagatcttgtattttttcagctctagaatttcttttggttcttttttatgtctttcatttttcttcttattttgttagatgtttatctttaaatccttgatcatatttataatagtcgtataggccttctttgcctattttatcatttcttatttttggatcagtttctgtactgttttatatttggaatctgtagagtcatgaatcttgggttacacaggtttataaaatacctcttcaaacaacttctttttggcctcctcttttctctttttatttatattattttttgttgttcctcactggttcacattcatcttatattttttctgtttttaagactctagttacacatgttagaccacttgaactacgtaatcacccaggctcatcagtcttattgttgctgcataagtgcttgttacattaagaaaagtatgtaaaaacatacatgtatataataatataatacaaagtaatttaaacatattaaaatgtatttgtagttttttatttatcccttttgaaatacattatattgaactgactgaaaaagggagaaaaacatgtttcagtggttgaagaacatggtagatgaagtagttcattttgaatggctttagttccttaacaaaaaagtcagtggtgaagttgcatattttagtataatatttaggagctgcagttggggaatttgaaatggcttttgtgaattatttattaaaatcctatcctacaagaggaatcctggtaatggcagtctgaaaatgttgcaaggacctagttcaagtgatacatgtatgcttaattttgtgcggcatgaatgtaggtaacagcggggaagccaagcagaatgtggattttaggtaggggcatgaagggagaatgttatactacctgatacacggagatggatgctctctaaccacaattggacctttgctgcctgctgttcttagaataaaatgaacagttttttttttttaaagaaattcattatgatggggatggaattgggcgaagcaatcgtagattcattcatcaaaaataattattttgaggaaaaaaattccattggaatacttatatagttcattatagttcatagaagccagcaagccaggaatgagggaaataaggagcttgacacttgttgttggtatgagatgtaacattttaacattgcttgtttttgcttaggaagttaggctgcttaataaatgtggtgcagtgaaggatctttacagtcaagataaacttttagctgatttacttttgtttaatcctcattattttggggctaattcacagtatctttagtatagtttttcctccttattgttctatatcacttgttaaccaaaaagtggcaggtctcaatccatagaggtttacttagtcaagggtttagtatgtgcctgggaaaaacaagccacaggaacagttgtgacctgtgcttttctagaggggttttgggaatttcggtgtttaaacggggaaagggcaagcacaggttaaaaaagagggaaaggtaggcagtgaggcaaatggttgcattcttgtgaggctctgactagcctcaataaatctacactttacatgtgaaaagagggagtagaggaaaaagtcatttgggttggttccaagtctttgctattgtgaatagtgccgctataaacatacatgtgcatgtgtctttatagcagcatgatttataatactttgggtatatacccagtaatgggatggctgggtcaaatggtatttctagttctagatccctgaggaatcgccacactgacttccacaatggttgaactagtttacagtcccgccaacagtgtaaaagtgttcctatttctccacatcctctccagcacctgctgtttcctgactttttaatgatcaccattctaactggtgtgagatggtatctcattgtggaaccaacccaaatgtccaacaatgatagactggattaagaaaatgtggcacatatacaccatggaatactatgcagccataaaaatgatgagttcatgtcctttgtagggacatggatgaagctggaaaccatcattctcagcaaactatcgcaaggacaaaaaaccaaacaccgcatgttctcactcataggtgggaattgaactatgagaacacatggacacaggaagggaaacatcacacaccggggcatgttgtgaggtggggggaggggggagggatagcattaggagatatacctaatgttaaatgatgagttaatggatgcagcacaccaacatggcacatatatacgtatgtaacaaacctgcacgttgtgcacttgtaccctaaaacttaaagtatagtaaaaaaaagaataaaaaaaaaggaagtcaattatgcattcgtcttagtgtaggtgaagggacgatttctggtcttgtcctgtgtctgtgaagataagctgataattgacattgtgaggatgagatttgacagaactcagctttagagctagtttatagggaggatacatatcttaaatgatttaggggctcacacggaaattccttgtgagtaatctgtgagggaagccatctggggagatatgtgcccttctatcgttgtgggaacctggcatatggataaggctatgacacagggttgtgaatttacagctatctgggaacaaaaagaaggcagtatggtgtgactcggttcccaagcttatcttttgctttggcatagtcagtttggagaccagaggttctgttgttcttttacatacttgtactctatctttttgagttttttttaatataaagcttaaattttttctctcatctgaagaacttacagctaagtaagataatattttgagagattcaaaagtatgaaatggctggctctggaactctgacataagatttaggattataaaatcctagaatcctagattttaaatcctaaaattttaaaatataaaaggagtgaaaatacagagagacctagattttgtttgaaatatttcatttctttttgggcattggcaagattataatgatggtggagttttgcaatgacttttgagtgtttctttttttgtttcttcagaaatttctacacccagaccatcttctccaggtggactacctgaagaagatagtgttttatttaataaactgacctacttaggatgtatgaaggtttcttccccacgtaatgaagtagaggctttacgggcaatggcaaccatgaaatcttccagtcaatacccctttcctgttaccctgtatgtaccaaatgttccagaaggttctgtgaggtaagctctaatttgtttttctttagacacatattaagtcttttgggtggtggtgaagatgttatagcatcatcaggtgtagaacttactgtgaactcacactgtagacatgcagagtaaacatgtttaggcttagactgtgttcattgtttgaaaggggcatttgaacaattgtattagtctattcttgcactgcaataaagaaatatctgagattggataattgataaagagaagaggtttaactggctcttggttctgcagggtgtataggaaacatgatgctggccatctgctcagcttctgggagggaggcctcaggaggggaggcctcaggaaacttaaaatcatggcagaaggcaaggggaagcagaattgtcttacgtggcaggagcaggagcaagagcgagaagggggaggtgccacacgcttttaaacaaccaggtttcatgagaacagctatcatgagaacagcaccgaggggatggtgctaaaccattcataagaaattgttcccatgatccaatcacctttcaccagccccacctccaacattggagattacaatttgacatgagatttagacggagccgcagatccaaacccatatcaacaattacgcttagaatattataaatagaaataaaacggtaaaaatacttgtaatatttatttctctatcctgaatgagcataaaaatctgccttcagcttctgaagtaatagtggttgaaagaaactggagtgagccatagattttaagttatttacattagactggaaagaagcaaaatggctttttcctcttatgcttaattaggaataatacattacctcagctgaacctttagtttctttaaatgtaagtcagggccaggtgtggtggctcacacctgcaatcccagcactttgggaggctgaggtgggtgaatcacttgaggtcaggagttcgaaaccagcctgggcaaaataatacaaaaatttgccacgtgtggtggcacacgcctgtaatcccagctgcttgggaggctgaggcaggagaatcgctcaaactcgggagatggaggttgcggtgagccgagatcatgccactgcactccagtctgggtgacagagacccccatctcaattaaaaaaaaaaaaaagtggccgggcgcggtggctcaagcctgtaatcccagcactttggaaggccgaggtgggtggatcacgaggtcaggagatcgagaccatcctggctaacacggtgaaaccccgtctctactaaaaatacaaaaaattagctgggcatggtggcgggcgcctgtagtcccagctactcgggaggttgaggcaggagaatggtgtgaacccaagagatcgtgccactgcgctccagcctgggcgacagagcaagacgccatctcaaaaaaaaaaaaaaataagtcagataatgttattctcctacattcggcctttccctcagtcacacttgtggttatatttgaaatccttatcatggttaggcactgttgacctactgctccaacttgttcttcccctcttcgtccttccttcttttcttcttagcctgtttgggctgctgtaacaaactgccatagactggtggtttacatacaacagataattatttttcacagttctcgtggttgggagttcctagatcaaagctccagcatatttggtgtctggtgagggcctgcttcctggttcatgtgttcttacatggtggaagagagtgtaagagctctctggggtttcttttataaggatactactcttattcaagaggactcccttctctctctctttctgtccttctgtctccctcctcccttctctctcttcattcatcaaaagaagatgcagatttgtgtgtatgtgtgtaagatgtgcaagaatatgaagataatttttttttttattatactttaagttttagggtacatgtgcacattgtgcaggttagttacatatgtatacatgtgccatgctggtgcactgcacccactaactcgtcatctagcattaggtatatatcccaatgctatccctcccccctccccccaccccacaacagtccccagagtgtgatattccccttcctgtgtccatgtgatctcattgttcacttcccacctatgagtgagaatatgcggtgtttggttttttgttcttgcgatagtttactgagaatgatgatttccaatttcatccatgcccctacaaaggacatgaactcatcattttttatggctgcatagtattccatggtgtatatgtgccacattttcttaatccagtctatcattgttggacatttgggttggttccaagtctttgctattgtgaataatgctgcaataaacatacgtgtgcatgtgtctttatagcagcatgatttatagtcatttgggtatataccgagtaatgggatggctgggtcaaatggtatttctagttctagatccctgaggaatcgccacactgacttccacaatggttgaactagtttacagtcccaccgacagtgtaaaagtgttcctatttctccacatcctctccagcacctgttgtttcctgactttttaatgattgccattctgactggtgtgagatggtatctcatagtggttttgatttgcatttctctgatggccagtgatgatgagcattttttcatgtgttttttggctgcataaatgtcttcttttgagaagtgtctgttcatgtccttcgcccactttttgatgggattgtttgtttttttcttgtaaatttgtttgagttcattgtagattctggatattagccctttgtcagatgagtaggttgtgaaaattttcttccattttgtaggttgcctgttcactctgatggtagtttcttttgctgtgcagaagctctttagtttaattagatcccatttgtcaattttgtcttttgttgccattgcttttggtgttttggacatgaagtccttgcccacgcctatgtcctgaatggtaatgcctaggttttcttctagggtttttatggttttaggtctaacgtttaaatctttaatccatcttgaattgatttttgtataaggtgtaaggaagggatccagtttcagcttcctacatatggctatccagttttcccagcaccatttattaaatagggaatcctttccccattgcttctttttctcaggtttgtcaaagatcagatagttgtaggtatgcggcattatttctgagggctcttttctgttccattgatctatatctctgttttggtaccagtgccatgctgttttggttactgtagccttgtagtatagtttgaagtcaggtagtgtgatgcctccagctttgctcttttggcttaggattgacttggcaatgcgggctcttttttggttccatatgaactttaaagtggttttttccaattctgtgaagaaagtcattggtagcttgatggggatggcattgaatctgtaaattaccttgggcagtatggccattttcatgatattgattcttcctacccatgagcatggaatgttcttccatttgtttgtatcctcttttatttccttgagcagtggtttgtagttctccttgaggaggtccttcacatcccttgtaagttggattcctaggtattttattctctttgaagcaattgtgaatgggagttcactcatgatttggctctctgtttgtttgttgttggtgtataagaatgcttgtgatttttgtacattgattttgtatcctgagactttgctgaagttgcttatcagcttaaggagattttgggctgagacaatggggttttctagatatacaatcatgttgtctgcaaacagggacaatttgacttcctcttttcctaattgaataccctttatttccttctcctgcctgattgccctggccagaacttccaacactatgttgaataggagtggtgagagagggcacccctgtcttgtgccagttttcaaagggaatgcttccagtttttgcccattcagtatgatattggctgtgggtttgtcatagatagctcttattattttgaaatacgtcccatcaatacctaatttattgagagtttttagcatgaagggttgttgaattttgtcaaaggctttttctgcatctattgagataatcatgtggtttttgtctttggctctgtttatatgctggattacatttattgatttgtgtatattgaaccagccttgcatcccagggatgaagcccacttgatcatggtggataagctttttgatgtgctgctggattcggtttgccagtattttattgaggatttttgcatcaatgttcatcaaggatattggtctaaaattctcttttttggttgtgtctctgcccagctttggtatcagaatgatgctggcctcataaaatgagttagggaggattccctctttttctattgattggaatagtttcagaaggaatggtaccagttcctccttgtacctctggtagaatttggctgtgaatccatctggtcctggactctttttggttggtaaactattgattattgccacaatttcagctcctgttattggtctattcagagattcaacttcttcctggtttagtcttgggagagtgtatgtgtcgaggaatgtatccatttcttctagattttctagtttatttgagtagaggtgtttgtagtattctctgatggtagtttgtatttctgtgggatcggtggtgatatcccctttatcattttttattgtgtctatttgattcttctctctttttttctttattagtcttgctagcggtctatcaattttgttgatcctttcaaaaaaccagctcctggattcattgattttttgaagggttttttgtgtctctatttccttcagttctgctctgattttagttatttcttgccttctgctagcttttgaatgtgtttgctcttgcttttctagttcttttaattgtgatgttagggtgtcaattttggatctttcctgctttctcttgtgggcatttagtgctataaatttccctctacacagtgctttgaatgtgtcccagagattctggtatgttgtgtctttgttctcgttggtttcaaagaacatctttatttctgccttcatttcgttatgtacccagtagtcattcaggagcaggttgttcagtttccatgtagttgagtgattttgagtgagtttcttaatcctgagttctagtttgattgcactgtggtctgagagacagtttgttataatttctgttcttttacatttgctgaggagagctttacttccaactatgtggtcaattttggaataggtgtggtgtggtgctgaaaaaaatgtatattctgttgatttggggtggagagttctgtagatgtctattaggtctgcttggtgcagagctgagttcaattcctgggtatccttgttgactttctgtctcgttgatctgtctaatgttgacagtggggtgttaaagtctcccattattaatgtgtgggagtctaagtctctttgtaggtcactcaggacttgctttatgaatctgggtgctcctgtattgggtgcatatatatttaggatagttagctcttcttgttgaattgatccctttaccattatgtaatggccttctttgtctcttttgatctttgttggtttaaagtctgttttatcagagactaggattgcaacccctgtctttttttgttttccatttgcttggtagatcttcctccatccttttatttttgagcctatgtgtgtctctgcacgtgagatgggtttcctgaatacagcacactgatgggtcttgactctttatccaatttgccagtctgtgtcttttaattggagcatttagtccatttacatttaaagttaatattgttatgtgtgaatttgatcctgtcattatgatgttagctggtgattttgctcattagttgatgcagtttcttcctagtctcgatggtctttacattttggcatgattttgcagcggctggtaccggttgttcctttccatgtttagcgcttccttcaggagctcttttagggcaggcctggtggtgacaaaatctgtcagcatttgcttgtctgtaaagtattttatttctccttcacttatgaagcttagtttggctggatatgaaattctgggttgaaaattcttttctttaagaatgttgaatattggcccccactctcttctggcttgtagggtttctgccgagagatccgctgttagtctgatgggcttccctttgagggtaacccgacctttctctctggctgcccttaacattttttccttcatttcaactttggtgaatctgacaattatgtgtcttggagttgctcttctcgaggagtatctttgtggcgttctctgtatttcctgaatctgaacgttggcctgccttactagattggggaaattctcctggataatatcctgcagagtgttttccaacttggttccattctccccatcactttcaggtacaccaatcagacgtagatttggtcttttcacgtagtcccatatttcttggaggctttgctcatttctttttattcttttttctctaaacttcccttctcacttcatttcattcatttcatcttccattgctgataccctttcttccagttgatcgcatcggctcctgaggcttctgcattattcacgtagttctcgagccttggttttcagctccatcagctcctttaggcacttctctgtattggttattctagttatacattcttctaaatttttttcaaagttttcaacttctttgcctttggtttgaatgtcctcccgtagctcagagtaatttgatcgtctgaagccttcttctctcagctcgtcagtcattctccatccaggtttgttccgttgccggtgaggaactgcgttcctttggaggaggagagacgctctgcgttttagagtttccagtttttctgttctgttttttccccatctttgtggttttatctacttttggtctttgatgatggtgatgtacagatgggtttttggtgtggatgtcctttctgtttttagttttccttctaatagacaggaccctcagctgcaggtctgttggaataccctgcagtgtgaggtgtcagtgtgcctctgctggggggtgcctcccagttaggctgctcgggggtcaggggtcagggacccacttgaggaggcagtctgcccgttctcagatctccagctgcgtgctgggagaaccactgctctcttcaaagctgtcagacagggacatttaagtctgcagaggttactgctgtctttttgtttgtctgtgccctgccctcagaggtggagcctacagaggcaggcaggcctccttgagctgtggtgggctccacccagttcgagcttcccggctgctttgtttacctaagcaagcctgggcaatggcgggcgcccctcccccagccttgctgccgccttgcagtttgatctcagactgctgtgctagcaatcagcgagattccgttggcgtaggaccctccaagccaggtgtgggatatagtctcgtggtgcgcccttttttaagccggtctgaaaagcgcaatattcgggtgggagtgacccgattttccaggtgtgtccgtcacccctttctttgactcagatagggaactccctgcccccttgcgcttcccaggtgaggcaatgcctcgccctgcttcggctcgcgcaccgtgcgcgcaccaactggcctgcgcccactgtctggcactccctagtgagatgaacccggtacctcagatggaaatgcagaaatcacccgtcttctgcgtcgctcacgctgggagctgtagaccggagctgttcctattcggccatcttggctcctcttcgataatttgtttacttgcattgttagtaccactttcctctccctttctctgtcttcattcactacattccagttatactagcctctgtattcattcttataggacttaccagtcatatttcccgccccaggaccttggcatattatctttatactccctaagtaaatctttccctgattttccaatgctttttgtttcatcttagtaaacattttatcataagaagccttccttggttatatcatgtaactctctttcctcatactgggccatttttttttccttcgtagcacttttctttgaattgatattatatttatttgcttattggtttattggatatcttcctcactagattataagcttgtgagaatagtttctttatatttttccctgctgtagcttcagtggctagggaagtaagtgattcattgtaagattttagcaaatatttgctgaatgaacaaataagcagaccaggtcaaggaaatgaggttgaatttgtctggagcctggaatattctctgaaagttgctttaatcttttaaaaaccctttctgatttgcctcattctctaaagtttagaatgtgggaaaacttttgctaaattccaagtaccaaaatattggcaatataaatttagaaaattttggtaaaaatgctttgaatttttcaggaaagggtttgcatgtatattgtttatatgttatcgtctaaaaatgtcaaaatgtctttttaaagaaaaattgttttcaaagtgtcttctatgctatctgtttagcttcaatttgccaaacacaccttgacagagatttagtgttttgacttgcctctttattcctggggttgtccccttaccctcagtttctaaatttgagatcttgaaggggtcttgaatgtgtagatcagtccaggacttaggatttgttttgttttgttttgtttttgtttttgtgtttgtttttgtttttgagacacagtttcactctgttccccaggctggagtgcagtggcacgatcttggtgcactgaaacatctgcctcctgggttcaagcgattctcatacctcggcctcctgaatagctgggaataccggttcccaccgccatgcctggctgatttttgtatttatcagaagagatgggatttcaccgtgttggtcagactggtcttgaactcctgacctcaagtgatccacccatctcgacctcctaaagtgttgggattacaggcgtgagccactgcgcccaaccaggacttaggatttgtgtagggaaagtcagataattatttgcttccaaatcccagactcctttcagcttttgtattccgttgttgaattcatctttggaaccacctgaccttttctgtggtagaaagggcctcagttgaacaatgaattagggcttagataaactaataggtgctgctctgtatagaagtgggctctccaggaatagtctatactattctagattggcattccttttgccataattgaaaaagactagatttagggatgggtgatagagatgttaccaggcacgtatacttagctttggagtaaatgagttggttcataggaaacacaagaatgaagaaattgtgagaagataataaagaatttatgtgtatgtgtgtgtttgtgtgtgtgtgtgtgtgtgttgtgaatatgaagacaagttgttctctcttgcattgttagttccagtttatttttgtgatttttaagatagttatgtttggccagatgcgggggctcacgcctgtaatcctagcactttgggaggccaacgcggggggtcacctgtggtcaggagttcaaggctagcctggctaacatggcaaaaccctgtctctacaagaaatacaaaaattagccgggtgtgatggcaggcacctgttatcccaggtacttgggaggctgaagcaggagaatcgcttgaactcgggaggtggaggttgcaatgagccaagatggggccacttcactccagcctgggggaaagagcaaaactctgtttcaaacaaaacaaaacaaaacaaaaaagatagttattttatatatcatatattgtcatagtaaaactatttgttctttttttttaaaaaaaaaaacctaactggaaatatgtctttgttcttcgagaattaatattttatctaacttttcattactgttctacagaattatagaccaatccagcaatgtggagatagcatcttttccaatctataaggtgttattctgtgcacgtggacatgacggaacaacagagagcaattgctttgcatttacagagagttcccatggttcggaagaatttcagatacatgttttctcctgtgaaattaaagaggcagtaagtataatatagtatagcaatttgctatagagatgaattagggtaatatttttgagctctaatttcactgttgtataaatatgttacataaatttggagtatgtttctaaagacaaaattaatatttgtaatgacatagaactgaatgtggaaagccaagtctggtatatctgcataggtagggcactctcacagcttagcagttgtcgtagaaaaatacaactggatgagttgcctttccaccttaccatggtagtaaattgcttatgctcagaagggagactatttttgcagctctcttattattttgccctagtagattggtccatgtgattttaaaaagtgcctataacgatacctgtttctctgatgggcttgatagttgcatattgctttcatttagatattgcattaagattattttatcaatctctgtggttttcattgatgattatttgttttgtgctttcttgctcagaggctatattttgctccagagaactggcttaaataaaattacaaatgctcacttaaagcaggtataacaacttgtagtcctttgaaaatgctagtaagtttttttatagaaattactaattggtagattattgttaggagaaatggtttagattaaatgcagttaattacatagggaaatcttttctacatctattgaattatccccaattttaaaatgttgcactgttagacacttagtacttaaaaccatttcaaaggcattcataaatgggtgtggatggcaatgtctcaggtatgtttgcttgtgacaaaataaattatcagcagaaaatgctgaaagcaatagttattctagcctctatcatgaaacatgaataaatcattctattaacaggagttttgagtttatttctggcgacaaaatgggaattaatggaaatatggatttctgtgagtttgatacaaagcatgatggctatgtcagttcttgtgccctggtgatcagtttgctttacactaaactgaacatgcacagacacatataatttagattgtaactgtagaaattctctatcagaacccatgccttctgaaagaagttgaagttttgtgttttgttttttagataaggctttatctatttttttcccagcacttacatatctatgtgtatactgacttcttgttcaaaatggtctgatagacaggagagtgaatgagtataagtatgctgctagtgtgcctagcatatagtagacagtgaatataaatatgctgaaggaatatgtatgtttctgtgaatgaggggggctatttctgatccttacgaactccactacagaggtggggaagcagatggtagaatcctggcatttcatgttggcagccatcatttaacccacctgtgtgatttccgaatcactggagctcaacagcaaggaaatgagctttgaagacctggaaaatctgctgcttggagagagagaaatgctgctgcagaaggatactgaattgctgcaagaagtttccataactaatggtatgaaactgtcttttggattgtagcattcacttgggtttagagtaggggaagtgtttatttttgagagcttatcatggtaggtaagtagtggaagaaaccctgggaagttcttggccagaccattttggatatagtattaaataaatgctgtttctatagagcatattttttccattgcacgttgtaagaaagttatctccatctattatttaattttttgagtgcattttagaaagtattacattatgggggcattagtggtaaaatatattgtttgaaggagaaatacatgacagtggtcattaaaccttattatgagacattatttctttttaaaaaaaattttaaaaatcctcctccaggtaatgaatgacacatcagttctaaatgaggaataacccaatataaatagagagcttatgccaggcactgtgctaagcgttcatttgatactcataacagcccgtgaccaggttggacttattagacaagtgactttatgtttctctttgcctggagcagttctattttatgcttattgtccaggtttttactaataccctcatttttattctcaaaagtgttgtggtttggatgataaattgtttggttaccctttgtttatcctgtggctaagagactgggtgatagagctgggttttaagttgaagtctttgactttgaagagccatacagttttcagtaacaactttcctgttgcttacatattataaaacacaaatgtggatttttgtattttagttatgttttataaagggatttattggtaacatagcttgcattccatttacgttttgtattttacctggcccttttgcagaagatgtccaacatcttcctctctgccctacaaaataattatggttgtaattaatctgaagtcttctagttacatttactggtcatccggttgtctggttcccagaagttttctgttctttgataaacacctttagtcgttagtatttgagtgcctcttgatgggcacaaacagttggcagatagttcaggaaccagctgacaaacattcttactgcttaagtatgtactgtgcagcaatgccacaaatttattttttatttttattttcgcagagttcgtggatgagagctgaagaggtttgtcgttaaaggaagatttctgaagcaggagtagcagcatggctgccactactgtcactgtgatgcttatttcactataaaatccctcaaactgcaggcatcaacaatggtagaagggaatcccagtgagggtgatggccctcttgaacacctgtgacacaaggattgggaggtcccacagaagggttaggacacatttgacttgcaacacttggatgtgcttctgcaggactgtgctttagtagatttcaataatctatggcaaaagagttggacaatccaaccagaagtatcttgaggtcaatgatctttgtataaggagaatgatatgctaggcttctgctgaagaattgcagaccaagcaaggtatcagaaagtgtagtgaaaaaaatacaaggaggcacctgttcttgtcacatctttttggatatattatataaaactttcaaaagatacttttaaagtgttaattgagtctttctaagattttatttctactagccagtgtaaccattctatgcaaagcagattttgatgatatttgtgtgttttaggatactattcagtattagaaactctgttacattatggaagcatgttttttgtcatctggtgttaaaggcattcagagatacttcttgataaatatcaagggcatcattgggaagatacttattcttattgcattgttttttcttggggttgcagatatgacactgtataaaagaaaacgtgttccttgcatgggaaaatttctttttctttgagatggagtttcactcttgttgtcaaggctggagtgcaatggcgtgatctcggcttactgcaacctacacctcttgggttcaagtgattctccagcctcagcttcccaagtagttgggattacaagcatgcatcaccacacctggataattttgtatttttagtagagacagggttgcaccatgttggtcaggctgctctcaaactcctgacctcaggtgatccacctgcctgggcttcccaaagtgctgggattacaggcgtgagccaccacacccagtggagaatatcatttctaaacaagtatttatttaattgttatgttagctaaatgcctcattttggaagataattcgaagttatcttgttagtgttttccttaaatcaattgatttttatgattttaaaaaagtttcctggtagtgtgcctcttattttagctccttcccatgaataatgtatttgagctagctgttttaaaaattttaatacatacctttcaaggtgcctttcatagaatgatttttcacatttatttcttgggtgaactttttatttttttttttgaggcagagtctcactgtctcccaggctggagtgcagtggcgtgatctcggctcactatgatctccacctcctgggttcaaacgattcttctgcctcagcctcctgagtagctgggattacaggcacatgccaccacgcctggctaatttttgcgtttttaatagagacggggtttcaccatgttggccaggctggtcttgaactcttgacctcaaatgatccacctgcctcagcctcccaaagtgctgggattacaggtgtgagccaccatgcctggccttgggtgaacattttcttgatatatggtgtttccaaaagagtgagttatctttcaccagtattaatgaaaagacttcatcttggagaaactagctatgttatttattttaaataaatacctttgttacttaataacagtgtttggacttttaagatgtaatacatatttgagaatttggaaaatattgaaataaaaaagaaaataaaaggtgcttaaaattccgccgcagttaagattttggtgtatctccattccagatatctacatgtgctctcctccctgcctcttcaaaaacaacagcaacaaactcaaacagatatacagttttgtgtttagtattttctatagatactgttttctggagaaagattgtattatttatcaataaaccttttccttctgcaaagaaatgcccattcaagactatttgtgtgtatgtgttttaataagtgtgacatgtattgaagtgtttgccatggtatgtgtttttaatttcctttcttgatgtacagttagcccactatatttgtggattctacatccatggagtcaactaaccatggctttaaaatatttgataaaaatgtatggtttcatctgtactgaatatctatagccttttttccttgtcattagtccctaaaagatacagtataaaaaccattcacatagcatttatattctattaggtattataagtaatttagagattaaagtatatggaaagatgtgtgtaggctatatggaatattacacagttttatataagggacttaaacatctatgcattttggtatctgggagttttggggggtcctagaaacaattccccatgggtaccaaaggacaactgtaattggttatccagtttgttataagatactgatagtcattgtttctgaagtttatcttgttaattcttggattactgtttcagcttattcacagactctagaattcacaatatattttaactcttttggtagaaatggcagcttgtaagacatagtattaaatgcaatttgattgctgttaatgaaattaatgtactgtcgtgttctttctccaaaagagagatagatggaatcttatttttttttctccatcattctgtatcactctggctcagctccatacgcttaacctttctataaagaattttttgaagccttgccagatgctttagaatttgccaagttctttgactttttttgatatggccttctgatgtgacaagctggctgatctgacataaagaatgtgaaaaagaagagatgagaaaggggaaaaaagaataaatatggctggggtttaactaccaatgtatgcaaaattacatacaggtgttctcctgttttcacatacagtgctttcttaaaaatacgcttaagtccgggagtagccagaaagagtcatggcccaaaaccccctaacagcagttagtgtggcatctccacagtggggaatgttgtaggagttattaagaaattattttaggcatatagagatgaaaagggatccttgggaaattttcattttttaaagcatctctggaaaagtttcttgtaaagccccagctcttagagccaggccagcaacctataatatacaaatggtagccattagaaaccgggtccacccaacatggcaattcccagggccttcttgcccttgccccacatgttcctggcaacatggctgcccacacatatccttgcgtgtggagagcatcatggtgccctgcatttgcatatgaaaagctagggtgggagggccagctttttccacctgctacgtgaattgcatgcctagtcaaacccatcccatgagccctatgcaaatcagacatcacgtcctccagcctctgcatatatacctggttagtatgcatggcaggtggtgttctgtctcttggctttggagcccctctccctctgtctctgtatggggagccgctttttttttgcccttgtttcttgcctattaaactccctgctccttaaaacaaaactaaatatacactgaagttaaatgtataaaaatcagacagtagactttatatttcatttaggagtaggaagtggagaatacccagagaactaaaagtagtttaaagtctctatttacacttgaccttgtaggcatagtcttcaatgacatatttctagcatattctttggttctgttttcctctataaacacttgaattattgggctaaatccagtaactatccagctgaggctgaacctttctgtttttagcttatctaatgattccctctcatccatccccaagcacattcaacttaatatttgctggagtacaggctgtatgttctctcttgtatttctggcacctagactaatacttggtatgcagaaggtgctcaaataatatttgttgaatgaatgagtttattgtcttaattatataagttttgaggcctacagttcttattagcatcaatcttttgctgcttttttaatttttactcatataagattaaaatggggatagcatggtaaaataatgaagaaattttgggaacattatgatataaatatggtgctactgcagaagttgaactttagactggcaggtaggatttctgtatagttgttaaaagttaaaactgttaatttggcattgagaaggcactttagggtaatcattggttaatgggtataaatgtggcattcggaagtttttgaatgtgttagactgtgtgtgcttgtacaagaaaaagtggcagaatatgtgaataaaacaaaggaaaacagaagacctcatactttaacagactcttctgttatagggagtattcctgtttcaagcaagttacaaatattgtattcctagactaatacagttcaagaagtactttgaattcactttatctaaagtgagggatttattaatgttcacagcattcttcttatctgtacttcccaatgtgacacattgaaaatatttttttaacccttcacatttcaccttgttttctttgtcaacctatgcgtgggctgagagatttggagaatctttggtgcttcaagctcacaagtttgtgatgatctgatgcttcttttggaaccaagaagtagaataacttctggagaagtgttggatttagagtacttcttcactttaaggaaagaatatgagctatacacacaaatacacacacatatgtatatacatatatatgtatatatgtatgtataaaagtagtcactagagtggcctaataccaatagaatagataagaataagaccatttcagcattcattctgggaacccaacacttatagcacaacaacattgagtaaaaatactggtagctctttatgttactgactgtattgctaaagccagtatttgccttattctatggttctgtatctagcccctgaggctgagggaagtgaagagagaacttggagacttggccaaaaccttgtttgtgagagtgtgttgggaagattcagataccaatatcattttagtaaattatcttaggatacattcaatttcttgtatattttgaagcctagaaatatctataaataaatacagtttattttgtgaacttaaattagttcaatatctttatcaccatgtttaaatgtcagagttgtgagaagcaaatatttgaaagatagctttttttttttttaaagtaaaaggaattccttctttctttctttctttcttttttttttttggagacagagtcttgctctgtcacccaggctggagtgcggtggtgcaatggctcactgcaacctccacctgccaggttcaagcaattctcctgcttcagcctcccgagtagctaggattacaggtgtgcaccaccatgccctgctaattttttgtatttttagtagagatggggtttcaccatgctggccagtctggtcttgaactcctgaccttgtgatctgcctgccttggcctcccaaagtgctgggattacaggcatggagccactgtgcccggccctcttgcccttcttcattcttaagatgctcagatcctagttgcagctcctaaatcatagttctcttctggtctccagtatgtatgctggtggtgcttagtgttgaactttatctgtatatatttgaaaaccctcctcagatttgaacttaagtttccatgaagtgaaatgtaccccattattaatttcaaagtaaaaaattctgttaatttacttcttaagcgatatttcttcaatatttcccttcttggacttcacattgatgatagtttttaggttgtaataatttagagtttggatggtctacatttaccatctacagttgtttactccctctttttttaatgcacaagtgatgaaaatgttgtcatgtaatatctaaacaatgataaatacttagactatatataaaaatatatattctgccaaagaaaattgtcatggaaaattgtagattcaagagttaggagagaaggatatcagaatgcaattaaaacctttgcctaatggtatttccttttttattcttttaggtaagcagaattttgtacagtttctgtacagcattcaaacgttcttccagacaagtgtctgatgttaaagactcagttattcctacccccgacagtgatgtgtttaccttcagtgtctccttggaggtaaaagaagacgatggaaaaggaaactttaggtgaggcatttggaaagattaaaaattcgcattgtatctggagtataatataggcgcatataaagtttcaagaaactatacagtgttggcataaagcctcaaactgataaatatttggctggtgaattaatattttttattcttgtgcttgtcagatatttctttccttttttttttgagatggagtttcgctcttgtcacccaggctggagtgtgcatgtgcaatggcacgatctcgactcactgccatctctgcctcctgggttccagtgattctcctgcctcggcctcctaagtagctgggattacaggcgcctgccaccatgcctggctcatttttgtatttttaggagagacggggtttcaccccgttggccaggcttgtctcgaactcctgacctcaggtgatctgccttccttggcctcccaaagtgctgggattataagtgtgagccaccgcgcttggtcagatacttattttcttaatgatttaaaaaatactgatactgtagaaaatttagtaaaataataaaagtagaataaaaactacgatcttgtcagccacagtcacttttaacatttggtctcttccctttgtttatttctaggggaatttttacacaattgtatatatataccttttttttttctttatgttaagtgttctaatcaaaattgtttttaacagtaactgataatatatggtttgaccaccacttaattaaccatttcttttttttttgtacatttagaatgttttcctccagttcagatatagacagttaataggaaacagttatattatttaatgctcaactttgttccttagctgtgcctttaattctaagagtagttgctagctaggtattttatctgtagttttacagacattgaaattgaggtcatgtaaaagttgctcaagatattttttctttttagataagacaagccatattttatacattgattattttaatgaattaatttgtaagaatagtctagcctaggctagaatttgattaacttgtccctgttatgtatctctttgtccatcttttgtttatatattcatggatacatcacagtcatctcaaattctatgtgtctaaaagtatgctcttctcacttcctttgctttggatttcactgttttacaggcacttatgaccacccaaccagctaaaccagacatgtgacagtcttaagaacttcaagtaaacattattcctaaatttgttttaaaactgaaatttatcatgttgtcattttttttttttttttggagatagagtcttgctctgtcgcccaggcaagattgcagcagtgcaatcttggctcactgcaacctctgcctcctgggttcaaccaattctcctgcctcagcctccccagtagctgggactacaagcatgcaccaccactcagctaatttttgtatttttagtagagatggggttttaccatgttggccaggctggcctcaaactcttgatctcaagtgatcagcctgccttggcctcccaaagtgctgggattacaggcgtaagccaccgtgcttggccatgttgtcttttttaagatcttgcttttaactttggttagcagacaaaatataaggctcttgtaaactcaatttagaaattaataatgactgtgttgctgactataaagtttatagtcaaataaaattaatagtttgctgcctgtggcaaggtgagagtttagtatatcttaagaataagggtgttgttgcttaaatactttgttgttttgttctaaccttggaataggttattttatcattttattagattattggtaattcctattccttttgaatatttcagccctgtgcctaaggatagagataaattttatttcaaattaaagcaaggaatagagaagaaggttgtgattacagtgcagcaactttctaacaaagaattagctattgaaaggtaagcagcttgctcctaaatgctaccaaaaacttgtattgacattgttactgtctcagatgcattgctcagtgtggcttttcactatacttcattttctccaattaaaaatgaggataattaataatactttctctactttaacttagatgtaactggtttcattgaaaatcaattgctggggtaagtaaacatgaaatggttttagtttttcagtcataactgctacaactgggtttgttcacatctttttttcttgttccttatttacatacagcataaatacttttaacttttcaatcactttcgattactcttccacttagctgctggaatttcagaaactttaaaagatagatacatatttttaaaatatataaatacatacacatatacttgtgtgtcaattcacaggaaaactattcagaaaacaaaggaatggtaggacaaaagatataaataaagtcaacaagaaatgatagttctggaaaaaatattcgtaatgtagatgacaggaaaaggtaatgtctacaatatacataaatttcttaacaattggcagaaagcagaggagaaaaacaggtcagagtataaacagatcagaggaaagctactggatggctaagaaacatatgtaaagaggtcctgattcacaaaaagacagggaaatgcgaattatagtaaccttaagatatcagattgcaaaaatatgtagtgatggtgggggtatggggcaaagggaattctcatactgttaatggaaatgtaaaatgtacgtatgtcctttttgaaaaccaattaggcaacatatataaagattttaatacctataattggacacataagtcttattctagggaatctgtgctattcaaaataaaagtatcactatttaaggacatttgtaaggatgtttattaataaacttaattcaaagttaattcaatacctagtacttctttgtctttgttgctacatatttgttaaattgaaagttgctttgttatgccaaaaaggaagtgctcaaaaaaatgatgggggcatatgctaaagatagggtttgaaggggcttcaactggttacttcttgggcaatctgaacaacaaaataattaggtacttcagtcaattatcagtcagtactgaagtcaatcagtacttcagtcaaacaacaaaggatgtttattaatttaactttgaagtattatttttagtggcaaaaactggaaatacagatgcctatttggcttcaaggagcaagggaagttggtgatgctcaagagaaataaaagcctcttcatcaagactgctgtatactatgtcttattctagggaatctgtgctattggaaataaaattccaataataaatagattccctctgtcttccctccagtctctagactgggatgagggtgggaggcaattgaggcgctggctgatggcatcatggccacttctgttcctcttaaatataggagaaggtatctggcccccagttatctgctgtttttttttttagaaggtaggctatctagctccactttgttcccatctttgaatcctgccaggcaacaggaaaagttttattcagcatcttggtacagtgatgcatgcatgtgtttttaattgcttgcaaagtttggccatatgtaaaaaccatcttttataaattttaagatgcatgtgttttcatattgaacatctctgaaattgtagtttgtcttataattgatggcattttttaaatactttaagttctgggatacatgtgcagaacatgcaggtttgttacgtaggtatacctgtgccatggtggtttactgtacccatcagcccatcatctaggttttaagccacacatgcattacctatttgtcctaatgctctcccttcccttgcccccgaaccctgacaggccccggtgtatgatgttaccctccttgtgtccatgtgttctcatcgttcagctcccacttatgagtgagaacatgcagtgtttggttttttgttcctgtgttagtttgctgagaatgatggtttccagcttcatctatgtccctgcaaaggacatgaactcattcttttttatggctgcatagtattccgtggtgtatatgtgccacattttctttatccagtctgtcattgatggacatttgggttggttccaagtctttgctattgtgaatagtgctgcagtaaacatacgtgtacatgggtctttatagtagaatgatttataatccttcaggtatatacgcagtaatgggattgctgggtcaaatggtatttctggttccagatctttgaggaatcaccacactgtcttccacaatggttgaactaatttgcactcctgccagcagtgtaaaagtgttcctatttctccacattctctccagcatctgttgtttcttgactttttaatgattgccattctaactggtgtgagatggtatctcattgtagttttgatttgcatttctctgatgaccagtgatgatgagctttttttcatatgtttgttggccgcataaatgtcttcttttgagaggcatcttataattatagttgtcacctttttttcatgagatacaaaaaataatggtgagtcttaaaattgatggctttcttaaaattgatgaaaaagagctgaagatatcgtatttttgatgttgaatattacagttccaaaagaatatgattatattttgcatacaggaaccttttagtttttaggggtaagcattatatatagcagtgttttaaactttttatttggaagtaatttcaaacttacagaagagttaaaaacaatacaactagtagagagaagacctgtatactctttaccaagattgttaccaatatctcagtgttaccagtgttaccaaaatctcagatattgatgacattttacctaatttgctttgcattctctttctttttttgagacaaagtctcgctctgtcagccaggctggagtgccatggcctgatcttggctcactgcaacctccacctcctaggttccagctattctcctgcctcagccttctgtgtagctgagattacaggtgtgccctacaacgcctggctaattttgtatatttttagtagtgatggggtttcaccatgttggtcaggctggccttgaactcctgacctcaaatgatctgcctgcctcagcctcccaaagtgctgggattacaggcataagccactgtgcccagcttgcactctctttctcttctccctgctactcgctatacacacacagttgttttcctgaacacttttaagagtgagttaaatacatcgtggccctttcctccaagtgctttagtgtatgttttccaagaatagggatatcgcttacatcaccacagtatacttatcaacatacgtgaatttagcattcatacacaacttttaatctaacctgccatttgccttcctattttgccagttaacctaataatatcctttcccccactccagttcagaattcattccaggattagatattgcatttagttaccatatgtctttagctttctttaacctggaacatttccacagccttcctctgtctcttaagacttggacgtttttggagaatacatccatttttcctctttttaatataacattgcccatttttggctttgtttaatatttgtgactaaattcagattatatattgctgcatagtttatatgtccttcacagagtatcacatctggaggcagatggctatcacagagatagccatctgtcccttgatgatgatgatgttaattctgattacatagttaagatgtctgatttcttcccactatgattactttttttcttccttgcaaccagtaagcagtctgtgaggaaacacattaagaccatgaaaatatgctgggcgcggtggctcacgcctgtaatcccagcagattgggaggccgaggcgggcagatcacgaggtcaagagatcgagaccatcctgaccaacatggtgaaaccccgtctctactaaaaatataaaaattagctgggcgtggtggcgggtgccagtggtcccagctacttgggaggctgaggcaggagaatcccttgaacccgggaagtggtggtcgcagtgagccaagatcacgccattgcactccagccttgtgacagagggagactccgtctcaacaaaacaaaacaaaacaaaacaaccaaccacgaaaatatatcctgctcctcatcaaaatatcctccttaatttaacattcttgtatgattcttgttggatctagtctgtactatgatgattgcaaaatgattaatttctcaactcttgccttctctctacattttgtattcagtccttggcattctgatgtaaaccagagctttcccttttcttccatttaactacttgttattgatatagattcctaaatttaaccccacctcctccccccagtactatataattgactgaagtacctgattattttggtgttcaaattgccctagaatcaaccagttggagccccttcgaaccctatctttatgacatgcctgcatcatttttttgagcacttcctttttagcataacaaagcatctttcaatttaaaaagtctgtagcaacacagacaaagaagtactaggtattgagttaatttaactttgaataagcgttattttaaaatcttggacttttatgattaagtggtatattatgcctgaactgtgcctaaatgtaaaggaatgcaatccttccttttctcagtaagttccatgtttgatcaacttgaatatagaaacctagacaaatataggtgaaatagttgaatgcctaattatatatatgttctttgctaactgggtagaacatttgcacacacatttaaatatattacacaaaacaataacttagaaatgttactttttgcccacccttatattcatacaacaattttatcagactctcataatctttaatattgatatcttcatcatccttaaaactactttttgaataattttaaggcattttttccagagcacattatgtcaacttctgcctgagttgagagaaaatgccttttgaatcagtatatgctactaacattggatattttaccaaaaacacgagtacacatttgtacacattaggacaattgtttttaaagttactttgaatacataaatgctatattggttttatttctttgttaattgacacagaagagttgtattattgtgtacatgttttgagatatgtatacttgtggaatggctaaattacattgtttttattttaacaactattttgctgatgctaatatctaacacttgcaaccttggactcatatatccaacagtaattactgaatccatgttaaatttcattgcttccttttccactgattctgtcagataatctctgtaaacatccaaatgttaattgactaagatttcttcaggtgaatgactcttccctaaacaatactttgttcagcataacagaccaaattacctgtgatacagaagatttagtaaattcttggatttttctatattggtaaaagaaacatttgcatttcattggattaaatgtggtatttaatatgtttaaatcagactgtaaacagtggaatttaaggtagtccagcaggtggcagccttaccaagaaaattcttaacacctctgaatcttttttgttagactgggtctcactctgtcacccagcctggagtgcagtggtgtgatcatggcttactacatctttcattgcctaggctcaagcgatcctcccatctcagcctcctgaggagctgagactacaggcacatgccatcattcttagctaattaaacatcttttttttggagagatgggggtctccctatgctgcccaggctggtcttgaactcctgagttcaagtgatcttgacttggcttcctaaagtgcttggcttcccaaagtgctgggattataggcgtgagccactgtgcctgacccaaatctttaataactgctgctgacaaagttaatttgtaatataaaagcattggtgtgaaagaaaatccttcaaattacataatttttatcttctgaacgagaaaataaaatttatcattaaaaaatttttaaaatcattatttaaattatgtaaaattatcaacattctgggtttttttttgtttgtttttggtgacaggacctcgctgtgttgcccagactggagtgcagtgatgtgatcatagctcactgcagccttgaactcctggggtcaggctatcctcctgcctcagcctcccaagtagctgggactacaggtgtccaccactactctgggctaattttatgttgtcttatttatctttcatagagacggggtctcgcttagttgtctgggctggtcccaaactcctggcttcaagtgatcttcttgcctcagcctcccaaagtgctgggattacaagtgtgagccaccatgcctggccaatattctgtttttttttttgaaaaatatattatgaaagaagccatttctgtgtgcatccaagggtttaagggttgtttatatctagatattttgcaaattatactgcagttgtctgtcttgacccttttgataacaagcactatgttgtttatcccagaatccccagcatctactatagtgcttggaatacagagctttatacttagctacttactccttacttagcactttctcagtgccaggcactgttctaggtggtatttctgaggtataggtactattatcttcatttttcagttgaggaaactgaggtacaaaagttacataacttgaccaaggctataaaattactttttaactaagtacatctagtactagaacacatattcttactctctactgcttctttttaaatacttgactaaatcaataaaaagtatataaaagtttataaagttagagcattggctaaatttgttgtaatatggaattaataactgcacattgcaccaataaaatcctatgtattttaaagaatgtatgaaaactgttctcaagtcatgaaaacttttaatattcttttccttttcttgattacccatgttggatatcacatattaagctttatttaataactggatataaaagagcaataataatggccaacatttaatgaacacttactatttggtggccattgaacaacttttcttaacatatgaggaaggtactgttattattactgcatttttttttttttttgagacagagtctcactctgtcacccaggctggagtgcagtggtgtgatcttggctcactgcaacctctgcctcccgggttcaagcaattcttctgcctcagcctcctgagtagctgggactataggcatgcgccactacacccggctaatttttgtatgtttagtaaagatggggtttcaccatattggtcaggctggtcttgaactcctgacctcgtgatctgcccgcctcagcctcccaaagtgctgggattacaggtgtaagccaccacgcctggcctattactccattttatagatgatgaaacagaggtttaatcaggttaagtaactttggttacttggccagaaactggtagagccaggatttaaaccagggtcatctgatttctgactgtgtactcttaaaggctaaacccaattaattcttgattatatactaggtttaaaattaagccagtttgaagataaatgaattggtattctttggtatcttttcagcagaatttaaaagtgcgaacttagatgttagggcattcaagtgattgctcagaaatttcaaaccctcagtgccttgggagaaaagccaatttgtagaagagaaagctgacattaacaactaagaggagaaagcaagatcattgtatatgaaatgtgtgaggagtggtagggcaaagcttacttattgagggtctccagctgagatgttaaagtgtgtgtacatgaggtcaggctcttctggtgttcccaaagcagaaatggtgatcatttctctctctgactagctgccattattatgggttttggtatcaccacatacagaaatattgcaaaagatttcttgcatactaacacattgatatgtatttttaaagccttgatagtgtttaaaatacactattactagcactgttacctaaatgcactattactagcactattacttagcacctacttggatgctttgaatagtttgctatgctcaatattccaaaggtgagagaaggggaaattttttcagtctttgccattagtgctctgtctagttgatttttttttttgccaagtattacttcttatttcatgataaaatgattcaagacaaataataccatatacatttagaaaatgggcctctttattattccttaacatgaagaggttccaataatggtagtttcaggccttggggaagggtaatcaggaagcgatttttggcaccaggttttatgtctgtcctatcactcttctcaggggtctgccctcatattaatacttgtgctaaccagaatgaagtagtgatacagcaagcagaatataatgattagagttgttataagcacacaactcaatttgcagtgagtaacatgggccaacactgttggaaaataaggatttccatgagccacttctatctcacattgatttggggggatacaatcattatatatacattagaaaaacatcacttctaaatgacagtgatcatatcagatcatgtagtttgatcatttggagagttcagtgatgtgcctcttttggtagcaattttgcttcagttttcaatttgtgcttgccggcttgcagcacaaactatataatgagaaactgaagtgataagaaccatactgtgtagcatgggtgattgatagtacctttccttgtgttattttcttgaggaaaagatatcctagacaaggagtactgaaaaaatcacccagggactctcttcttctcatgaaacagttttttagtgtgagttgacatcactaaatttgatggacagtagaatttgaattgtttattattttttgactgctctaacttgatgttagaccattctgagggtcttttgctggatttacttagtacttatttttacttttgccttagcaagttgttacagttttatttaggtaaaaactcaagttactatcttgaagttgcctagatgtcagtctgatttggatgttttattctcttatgtgaattagtacgtttatgaacttttacagcaaaataaagaattttagatgttataataatttctcttagaggatatcattcctccctttcctgaaaatgggaatagattagtgggatgacccatattctgcataacattttaaaagctaccctgtgagcttactcacttgtcctttttgtgttttcttttaaggcagtagaaggataactctctttttccataggaaaacaggtattacttacttatacaaaagtactttcattattctctgttaatgatttcatgtgacaattgatagaaagctattggcattttcaggtgaataatttggggagtggataactggaagcttctatctgactctcagcctttgaactgaaacttgtaatcaggacagaattttcagcatcttttcattgctggcttctgttggcacccagtggggagaggcggcatcatggtttaagtattaaatgtggatgtagtactattacgtttttagcattgtattttaagaaatacttttaaaatatgagcaatgaaaacatatattgttgtctgtaatgtgttctcataagttgattgattctagatgttttggagctcattaaaaaaaattccagtttgaagtaattgtagatgcacaggaaattgcaataatagtatagagatgctctatgtgtgcttccccatttccccctatggtaacatcttacataaccatagtacagtatcacagctaggaaactggcattggtacaatttgcagacctctattgcagctctttttgaatccttttataaatcacagtatacttctataatataaacatttaatttattggtttaagaaatttggatatgtagcctggctgctaattagaagagattgggtattttaaccatatcctatccagttaccaggttattgccccttggctccaaatctgtcctcttagctgatctgcattaatggagctttaaacatttcttctttgcagcaagcacaatattaaattatgccagtagagggtgttgcagggacactgcaggaagatggggtttcttttgtttctgatgtgttacatttattgttttcttgctcttgcttattgtaagatccagggacatccagtgatgctgtgcttttgctgatgtttggttcaacccagctgtgcactcacatgcagtccctccgtgagctcatagctttggttctgtctcagtgaggccctcctacagccttcctgacacagacactgtgtgccccaggcctcgtaccaccctgccagtgagctgactctggaagccctgatttcctttgcccacctgcctgccagcctttgctggctgcagcccagagggtttcctgcgtgcctgtggtctagctttgcctgggcagtccaacaaacttctttgctattcattgggctgtaatcctgccttctccagtgaggtctgaataccacctttggtgaaaggacccaacttccacgttagttcttcttgtggtactctcccttagctttagggttaaattctctttgtagttactctactatgacagttaataattctttatagtaaattttccctgtttaaattactgtgttttctgtcctaatcaaatgctgacttacagtatctaattgaattaatatctaatgatattaagcagtccataaagtttctgatatttttccaggaaaaacaaaacaaaaaagtggttattttagataatctttttactgtcacagtaatggcaaggaaaaaacaactattatttctaccgtatgtttatttccattccacgcacagcctttttcttactaaagcaagaaaccctgcaaagtagattatcttttatttacttttttttttttaacggggagtagggagctaaagcattttattttgccttgctatgagatctagcttataattggcaacacaagtatttgaatcaagaccatcttgctattcttcctaaagccttttcatttgactcttctgtatgactttctttcttttttggggggccgggggatgtttacaggggtcagtattaagtacctataaataggatatgattattttatttctttagtaaatattgtttagttactaatattttatccgtatttgtaatagtagcatagttgttttattcccttttcaagatctttggatcatttgaagggaagagggaggaagacttaaaaatgttattttttttttagtaggactttaagcaattaattaaaagttaaatatgtcttataggtgaaattttgtatttgtgctttaaatatttgatttttaaaattttcagcatattttaataaatttactcattctttttatttccctggtattttttaaattttgaagttttatatatttaggtgaattatttcattattccactgtactacaagaaacttaattcttttataatatgaaatgtccctgcttttaaggctaattttctacttgtatactctattttattccattttgacatctcaaagacattgtttaagcagtctttcttctaccacacttgcttgttagattagcccatccagtctcatgactttaaatatatctatgactggatgattccaaatgtttttctctgacctgaggtctccaaacttatatattcaacaacttcagatcttcatctggcatctcaaagttaatatgttcaaaaatcaaactaaaaaatcaagtttgacactgtcccaaacttgttcctcctgtaatttctcacagtctttttaatttgtaacttgatctttccaattattgtagatgaaaaacttggcattttcaactccattttctctcactctacatctaattcttcattaaatcatattagttctacttccaactatgtaaagaaagaaaaaccctagaggaaagggattaaagaaaaaatacgaatagaaatgggaaaaaatatagactgtagataaaagaaaaaaattagaaaaaaaaacaaaagaaatgacaatcgagagaaaaagaaataggaactccaagtctaatcactagttttcttattttatcaaaagttaatgtaggtacttttgctataaattttctcataaaattgaattcatcattttttgcccatgttttgttcaaccctatctacatgtgttttatgagtgataatcaggaatcagtagcctgcaaaatgagcctttatgaaggagaaaaatggacttttgttaatcagctgtagctgtacaggggaagatattccttttctttatgcttttagatgtttttgaattgtgtttacaaatacattcaattgtaaaaatacttgtaaattagcacccgtttattttgatgcatatagctagtatctgcaaaagcccaaataatgtatcactatctgaatgtcctgtattagtcttactgaatggaaaagcaaaataattgattttaaatgttttaagcagggattaaaccatgtcagactttgaaatttattggttttcttgttataatcatttttaatatattttaaaatctgactgtagctaagttctcattttgtatttgaagggagttagtaaaagtactcatatttggtgggaggatggcttgaatcaggaagtggaggttgcagagctgagattgtgccactgcactccagcctgggtgacagagctggagcctgtcttgaaaaaaaaaaaaaaaaaagtgaagaaggaaagcactcatatttgagttattctgcattttaaattttgaccctttattaatgtgagaattaatgggaacattattgctaaggatggtatggagggtttttttgtttttatttttgaaatttattcaatgaaaaattttaagaacattgacctaaaaatattcttctttctgtatgttattttctctgtactggtatttttttttgtttttgaaatttgttggttgaaaatttaaaaaaagtggacctaagatattcttcttttatagcctatctgcatgttaaattctctgtactggtagcagctctatggcagtcctaagatctatttaggttatttttttcttggtgatttttcctagtgttctaggaaatctaagatagatagttagttacatagacagatagatagataaaacgatttcctacctgatgaatgaaaagagtaaccaatttttaaatctggagagactccttcttcctattactgatatcactgaagttactagagtgaaatttttaggataaatagctatagagtaccctcatctgggtttgaatcttggctttacagtgatcttggtcaagttatttaacttctctgtgcttcagtttgcaatttgtaaattgtgaataaaacttacctcttaagattgtggggagaagattagctagtaactgtaaagtgttcacaataatgcttaataaatgcatgctattattactattagtggtactattacaacaaccacagttaagattttaagactattggtcttttttgagtgataatcagaagtaagtaacctgcaaaatctgagtagactgctaccactggaaggcaaaatcttggctagagttctttagaacctatgtgtgtatatacaggcagtccttgctttgtagttatggtatacattattttctcttaccgtggttcagttacaacactagtctcccaaacacatggttcaaatttctgttaccatagtatattaacagagtaattgcaaaacaaactctgctgttcagtccacaagtcactatatacatacatgattagtgaccaatcatgtcgcttcttccaaagtctgttggtgattggtcactgtgtatctgttattcactttacttacagatagcaaagtatgtggttgtgttgcctctttgtctctggtaataaatccatttgacattttacaaaaatggataatccaaagaggaaattggccaacaaagctaacagtgctacaaagaaatgaaaagtcataatgctgaaagtgaaattgcatgtaattttagaagatgcacagtcttagaagattttaaaatggcaacagcaaaatgaagacagaatgagacctaggcctgtataaagttgtgatatgaaccatattgaaaaagtatgataaatttaaaaaaatgataaaatcactccaacatcctttagtttaagtttcactaggaacagaaagctgcttatggtttaactggagcatatacttctgctttggattaagactgtaataaacaaaaattccaatcagttttgctagcatgtcagccaaaatactgaagttagatgccacatcaaaaggaaatagtaattataaggagactggagattatgcaatttctttatctcaattttgggagaaatatgacataaagcatgcagttgaagacatcatttcagggagcaacaatgaatattatgtctgtagtatagcaaacttttacttcgctatagaagtaactttgaaggatatgaataggacacttatggagatgtagaataaatagctgtctgtgggagtgttgacactgttgctattcagtggactctagatatgcagccagatgaactttgtgaagatgaacttatcagtgtaaataaggaaagtggttgtgatgaaaagcatgaatgttccaggggaaatgactctggcaaatttttcacattaaaggaactcttggagatacttcacaacattgaacatgcaaaggataaagtttggaagttaatccaaacttagaaaggaatatgacagtttgccaagatagaaaaaatactttgtattgtaaattatatgagaaggcagcaagcactgttcaatatattcttgataagtttttttaaataattaaaatactttaatttttgtgcttcaaacaacgaagtgctaaataaacaatagttttactttttaacaattgtcctatatatttataactgaaagtaagagagtttttgaagtttggacaaaaatttttaaaggttactgaagaatcataatttttccttttgaaaaatatcattttatatgcagttttgcttatatggttatttttgtggttccacaccactgtacatagtgacaaatgcctgtgtatctttctctacttcagtctttttagtaagggaaataacagtctcattgacacaatagaagatttgcccaattatctttttgctttagcccctttggggagactgactgagattccaacttttatgaaattatttagttttagtgttttgcataaagttttgaaaaactgtgattgcattatagattttcttatttgcagttctgtttttccctttctattatgctgtcactttttcatttttttttttttttgagacggagtcttgctctgttgcccaggctggagtgcactggtgcaatctcggctcactgtaagctctgcctcccgggttcacgccattctcctgcctcagcctcctcggtagctgggattacaggtgcccgccactacgcccggctaattttttttgtattttttagtagagacggaggtttcaccatgttagccaggatggtctcgatctcctgaccttgtgatctgcccacctcggcctcccaaagtgttgggattacaagcgtgagccactgcgcccagccactttttcatttttaataataaaagtttagtacagcaagagagcgtgttcttttcctctctctccttccctaccttccatttttatcttcatggagatatatgtaattcctaatgatttgatagactaaaggtaaaagtttttaaaaaattagtttcatattgcaggacattaatacaacatctgtttttctcactttttcctgcagttaagtctaaagccgtattagtgatacagagtttttggtatttgttctagaggttaacttggtgttaaaagctgcttaaagttctattttgagtaaacactaagtattactatgaaagggagagctttctcttcttaatggtaatggtaattataataatttataattatcaactgttttatagtttacagtgccctttcatcatgagttttttcttttctttttcttttttttctgagacggagtcttgctctgttgcccacgctggagtgcagtggcgcagtctcggctcacacaagcttcggctcacacaagctctgcctccccggttcacgccattctctcgtctaagcctcccgagtagctgggactacatgcgcccgccaccaggcccggctaatttttttgtatttttagtagagacggggtttcatcttgttagccaggatggtctcaatctcccgacctcgtgatccgcccacctcggcctcccaaagtgctgggatttacaggcgtgagccactgcgccaccgcgcccggccaggagttttttcatgtcgagtttacgttgacgtaatgaacatgaaagcaagtatttgtacttcagaaatgtggaaagtgagactttgaggtttgtgatttgcccagggtctctcagggagcttatagtcttttactgacagtccttggcaggctgtaatgtaaaagaccatatagttttgtagtgatagacatgggcatgaatcccggtcgtgtaacttagtagctatgtggctttgggcaaaaccattgtttttgaaaatcagttttatcgtttgttgtatgaaggttgctttgaaatttaaatgtaacagtatagtagagcctggcttaaagttaagacattcaataaacaatatctattattatgataataattgatataatagcatcatcagctcattctcaggaggttgatttcaatttttcagtgaagtcagctattcactatattataaattatgttggatgtctcttctatactttgttgatattatgtacttacaggtattttagaacgaatgatatcagattctaattgcctgtttacttattttcccccccactatactgtaaactccttgagaaaataggtgggatagcaatttgctttttaccttatctatagagttaataagagactgttgaatgctttgaactccccagtgaaacactgaatactcctattaggtgttaatgttactaataatatctatctaatttctgacacattattcctaatagatcttgctggcctccataggaatcctggtgtgctttaatgaagtgtaattttgaaaatgactaatacagcttgacagaaaataattatgtaatttaagtgcttaaagttcatgtattatacctttcctgtttgctagaagagggagcagagtcccagggggttaggtgctttctctaaggtcatgctggttggtggcagggctttttttttttttccaggccaggaaaagattagtgcattaaagattatcaaaataaggtgatgagtattgctacttaagaaaaatccaaacctctaaggctccttttgcagtacaatgtaatatagaaatattatgctgagaaaatgtgaaatttcatctattttatcattcacctggaagtgcttgagaaacaaatgacattaaactttaacttttattatagccatcagagattacaaaaggtaggagggtgggagagcggggtgaaggttgaaagattacctattggttacaatgttcagtctttggttgatgggtactctaaaagcccagacagactttatctctacataatgcatacatgtaagaaatctgcacttgtaatccttatgcctataaaaataaaaattaaaaaaaatctttttctgccttaaaaaataaaaaaatcctttaaattttcaaaaagaacaaaaagaaagagagtatactttccaaactgttagcattatttcctaaggaggctgacagaagggagaaattattttttctttacatactttggtatttgttaacttattatggtgactatataatgggtttgtaatttaaaccctataatatagaacattgttcttaaaacaaaaaaccattagagatgcaagctgaagcaaagtatgtagggatgtgtgagataaatctgttctcattgacctaattttttagagagtcaaattttatttctaaaaaagaattaaatcttttattcttccttagcaagaatttagggcagtagtataagaaatagtacagtgaattgcatgattgattattatttaatttgtgtagacagtgtttattacaagaattcataggagagagatcatagcagtatataggtgaaattatgaatactagagtataattatttctcttgtagattatattttgttctctgtatttgaaaagttatcctcagagcttaccaactttagctttgctatgtacgtgatcatttttgggtgccagaaggaagccttgaacaagtgatcctcaagaacttataggaagtatacatttactccttactaagcttacatttggacaggaccagtgatcttgctcatgtcagcattagccatgatactaggagagtaaacctttgaaaaacaacaaggatgagaataacggttgagtggttagctgccactattttgaaattgaaaaaatcttatgtttaatatagttatattctttaccctttctataaattgttacatagcatatcttgaagttttgggaaactacaataaaaacattcttgtgtgtgggtatgtgttgttggcagagggaccctgtggacagattacattgcttctcaagttacgagacctataatatagcagtatgaatttgggtaaattgcttaacttctctggactttactttgcttacatgtaaagtggagttaataatagcctaacaaacataaaaatcttcgagttagctgaattttagagcttatgcaaatcctttacaaataaagtggcagtgttgatgggattcctaaagcttctctggcatcaggaagcacagaacaatattaaatagttaacagtaaattaataatatgttggatataatatcttcactaatagcccatttagtaataaagtttgcataactttttttttttaaaactgaggatatagtattaacatgctacttagtgaacatgactgtggagggccagggtaacaacagtttgctttctttttaatctggtttgatgcaaagagagcatagtgtcatcttcttatttttaaaaacctcgtttttggtttaactgggttaatggattttgacctatatgtttggaataagtctaaggcaaataaaatctcttatctccctagaaactaatttgtatctcagtaccatattttctttcaattaacaacttatggccacttttatggtagtttcttattggtaatattttacatgcaaataaagatctggaaatttagatgacttatttctgtgtgattttattatctatcttcataaatacttatttctggtgtttttagaaaaaaaactaaagcttataaatacagagctcagattgtatagttattgtaaaaaggctttatgctcactgggcttctatatattcttgataccttatttctcctttttttcccccaatattttcagatgttttggaatgttattaagcccaggtcgaaacgtgaagaacagtgacatgcatttactggatatggtaatgataatcttaagcaccttaaccaagtatagatgatagttattttatatttgacaagtattttctatttacaaattttgtcatattgtcaaaattatttcttgcagctgtgtgatagtaataattaaatttggaaacgcaaacttaaaattacttgtgaaagaggaattcaggacaatttccaccaaaacagtcatatgcaacaaataaaaggattgtgttatgataatgtccatttatttttttggcttcttagaaagatatcttttctttgaacctgtagtaacaagtacatgattataacaagcatctccagagtgaatatggtgcctttcatttattttaatgcactgctattaatttgagtttgtgatgggtacttttgttttctttaaagcgtttccctttctgaatttcttcttgattacctgtccttagcaaagtacacttatactaggagtaatatttatttaaggaatgtccttaaaggttaatatatattcaacagttgatatttagtgtaaaagtagcaagctattttaactttcaaatagaaataccttctaatattgcagttagtgaaaacatttaatttgtgatttggagacgttataggaaaataatcatcttagagtaagtataaagtttcttagtgaactgaaattcttatatttagtgataataagcactatatgctttcttctttttagctgtgttttgcaaatatcagttaaacattactaattaggtcaacttttttttgagtaatttcatggtaatatcaatactgattttatagcagtacaggaatggtttattcaggcttttgggtacctgtttgtctgctaagtgttgtgtgaagtgatgaggttatgcatatgagtaaaatatagctcttaccatctgtgggttcatggtcttgtgggaaacaaactttttagtatctggtggtacttcaagccacagaaatatagaggaagcactgcctgaataggtcaggtaaggaaaaccagttaaattgattattaaaacataaattagctattgatctatgtctcttacatcttttttttttttcttgaccacatatcagtaatgaaagtggttttacctaaggcaagccattagcattttggagccctgaaaattccatgaggaagtaaattaggaggattgaggtaatgaaaacttttaagatcctaggtcctaattaatcatggtctttcagagtttaaaagactaagatgaattactgcagagatttgtccataaaacctaaattcagattacagaattatagaactggtataaacttctgaggccccttcactatgtctctctaactttcagaacagtcctccccacctttgagtccatatctaaatcaaaagagttgtgagcattcatgctctcagacagagaaggggcttacttgcaacaaatagttgggcaaatgagaggcttgtatttgcaatgattagcagttgtgatttgttattacccagtgttgttaatcttcatagtggacattgaacctcagctagactacttctaatgaagagaaactcattaccttatgttaaagtctaagggacagttctggttattacaaagttatttttttataatcacctgaaatcatagttcttgtaacttggcctaattagtcttaattctgcactctagaacaagatattaatacttttactccttctatgacactcccaaatatcatgtgatcctcatgacaggaaagtcctatttataaatgaagatatatttttcagtgaaatagccagattacttatatataacagtcatatgctgagtaagaaaatttccgtgaatgatggacccatactttaaggtcgtcccgtaagattataatgtatttttactgtaccttttctgtgtttaggtacacaaatggtattgttatagttgctatagtatttggtacagtaacgtgctgtacaagtttgtagccttggagcaacagcctagttgtgtagcccctataccatctaggtttttataagtacggtgtattctatttgcataaagaaatcacttaatgacacataacttagaacataaccctatcattaagcaacaggtgactctgtgtgtgtgtgtgtgtgtgtgtgtgtgtgtgtagaggagagaaagagaccattatcatatgagtgtgttggggctgctgagagggtttcgtttacaagtgaccttgagtgtatttcatctctggaatgcatggtccctgcgctcaagctacacaatctgattagtgaagtattactaatacactagaaaaatatacatagtaattaccaaatgactgacacaattttatagggggttcagagaaacatctgtgaatgggtaataatgaaaaaagaaaagtttttctctttgttttagtctgacccttttaacagtctctattcataatgtgaggaaatcgctacaaaaactgaaatattgtagatactgttcatttgcatatggaaatacttgtatgctgtgtgttgttctttcatgggacaaactctacccctcctctctccacacacatatacacaagctataagtagcctagctttcgccataggagttgctggcttttttagtgagagtcaagagctggcttggtaaagtcttaaagaatggagaagaggaggaaggagagaagggaagaaagagggagtaagtgtaacagtagagggagagagttaatacacttggatgctgcttacaaaccaaaaattagtctcctaatactaatttatgattgtaagaaagtatataaatatctgacatatagaaaatagacaagtgttaattttaaaggtattaattgctacaaactaaattaatattttaagaattcattaaaaattagaatattagaagaaaaatattaactttccctactgtgattagctactagttcagtttaactgtcttcagctaattctatattattgttttaatagaaaccatatacattcttatgtgtatatgagatttggacaattggtgtcaagatcaagttaaatacaactttgtaacaatattatgtttttttgattcagcatgtaagtatatgcctccttttatccaagggtacatgtctttaaatagaaactgtgcttgaagaaagctgtagaagaatttaatatttaaataaatgcttttgtaggatgaaaagaatttacagtgaatataaagctcctgcttgactgttaatctaaattttaataatttgtattgcttaaagtaagatgtaatttaaagtagtgatttttttgatgtcttttatcagtaattactgtttgaatttttataggaatccatgggaaagagctatgatgggagagcttatgtcatcactggcatgtggaaccccaatgcaccagtatttctggcacttaacgaggaaaccccaaaaggtgacttttcttaaaagatcccttattgtttgctttacattttatattatgaacaatgttgcttgtcatgttttaaaaaaaatttggaactcaaagtggacttattctttcattgagaatttgaggttcatttttattctttatgcttctatgggggaaatctccactatttaaaaaaatcctccccaaaagatatgtgaattattattattgttattattttaagagacagggtctcactctgttgcccagggtagagtataggggcattatagctcactgtaacctcaaactgtcatgctcaagcaatcctcccacctcagcctcctgagtagctattaaatagaactacaggtgtgtgctgccatgcatggctaatttttaaattttatttttgtagcgatggggtcatgctttgttgcccaggcttgtcttgaacctttgacctcaactgatcttcttgccttccaaagcactgggattacagatgtgagccactgcacctggcctgaattaattttattagattatagagaaagcatttgggctttgtttttcatataccactatagagttatttcatttgtggagactagtgatggagaaatattaaagaaaatgatgaaaaggaaatattttagaattttgaatatttttaaattattaactatttttgcattatagtttacttatagtttttcatttattaattattggctccagtcttttggccttcgggatgcttgtaatatatattaaatatttcagttgtagcaaatagttttttcttagttttttaacttttcatattatttatcatgtctagtattgaacagaatgtataaatgttgaatagtcacatttttcgttgttccattgtgttttttcattcctacttcatccagatagctgttaattgcctgttttttgccccttcattatctacttttaaactaaatttaaagttttacctgccgagttatatgcctaccctaagtgctttactgtcattaaaccattaattcatatttagaatataatggatcagtttgttttatcattaatttttatattatttagtttatacccacagtagacttttggttactgacaggaagcattcgtgaatactgatatgaaaatataatatgttaatgaagggcattaaaatgataattattctttcatttccttaaagagagtattcaccatttatataaatcacatacattgatcacatattaagctgtctaaaaataaaggctaaacagaaaaaaagattatataaaatttaacttttcatttattagcagtaaataatttttagacccacaatttgttatttctggagacaggcttgcaaatacctgtaacttctttcttatacttgttcagaaggaagccacaaaaatgataaaaataagccagttgacagttttgaagaacaaaatataagaattttgcatatcaagttataaaaatagtttttatgtttttaatgtaacacctagtttagttttattttgcaataaaatatatatttggtccacaaaagaaaatttatttataatttattctattaaactatataatagtatattataatattctgattcaaagtatacattttaaatttaacattatctcatatgccacacaaaaatgttgccctgatttttaaaatttctaaattatgtccttgaaattacacattactcagagaatgtgtgatcaaataaagtttgatttttatggaagaagtttagaacctgagagatgaaaagtcttggatctttccactgcactaagatccagttgaatgttatattctgtcttgtgttattactccttactcctttctctaaggtcctccaggtcaagtataatgtctaacaaattttagtttctcttgaattggcaggtgtatttagtaagactgtatttagtaagaatgtaataaaattgttattgaatttgagaagtagttgatgaatctgaatgttatataatatttaaaaacactattgagggtttcttctagtggtggccttggttatttggactttcctttaacagagaactaaaaattgtaaagaaaataaattttaaaaaatatttaaaaaggaatgaggaaattacaaaatggtatggaatgaccaggccatagattcaaaaacctcaatgaggccaggtgtggtggctcacgcttgtaatcccagcactttgggaggctgatgggggtggatcaccagaggtcaggagtttgagaccagcctggccaacatggtgaaaccccgtctgtagtaaaaatattttaaaaatcagctgggtgttgtggcgggcacctgtaatcccagctacttgggaggctgaggcaggagaattgcttgagccctggaggcggaggttgcagtgagccaagatcgctccattgtactccagcctgggtgagactctgtctcaaaacaacaaacacttaggattattagttcctaagaaacatgcttggagtacttgcatacttatttaatcaaaatgtgaatagaacagttaaaaataaacatagaaggtattacaattgtaaagaactttaattctttcataagtgaggaaactttgtttaaagtagacaaggaataataaagctcgcataaaacccagaaaatttctactacagataagcaagtatacatgactgtggcagtggatatggtagtcacagaggtggtggagcctgttcgctttctcctggagacagtagtccgtgtgtaccctgcaaatgagcgattttggtatttcagcagaaagactttcacagagactttcttcatgagattgaaacaggtaggacctttttgttctcttcatatatagtaacaaacatttttctttccacacttcttttttaatgccaagataattcctgaagttgcaaaacaatacaattcctcaaagaaatcaaatgatatttgaagtcaaccaatagagtgtttgaaaaagtcacatctaggtaatattagctaaaaaaacccagcaagtttaataattacatactttttccctagaaacctgtaatgtatgaaccttcttaacagaaatattgactgcatataaaacaacgtttctgccttttataaacaattacttaaaaccaaaaaggcagtgcacagaaatatcatatgcttataaaattttaatgaaaatgtttctaagaaatacctaatttctatagttatttctgcctgtaatattagatagacaatattatatgaacatcttgtttgactcatcagtgaggttataaaattattttaatattaaatgaacaaaattatggtttctatgatatcctcaaattaggcagtattagtagataaaatatgtaacttttgtattatagcaaaggaagcagataataatgaaaaataacttgaatgctaattgtgtgagtttttaaaaaatcaggataaaaatgctctattagaataatgaacatcttttatatgctgtttttgttagtactttcattctcccaagttttaaaatgcttgctgcttcatatactataatatgtggactgctgtgtgataaaagcaggcaccagtacaggaaacaaatatagaagcctcttacccattttcatattaaaaaaactgccatggcgcatctcggctttatatactatgtacttggaaattattgtggttttaaaaaaatctttcataaaattattatggctgttatttgactcagtttttattactgtgtgaactgcttttatagcatattctaatgaaggttatgtgagcaatattcaaacttcagtctcctgagcatcttttaatattttattatgagacttttttcctgtcttccttcctccccatccttcttttttaaaaaaatagcttagttatgactatccaataattcttcattttgagccaaagaattattcatagttgcataatcgtgaataaaggagctggagctgtatagaaagttgtcattcttctaatgatgataaattataatgtaaattatacctcctagagatctgagaaaatgttaggtttttcccagttctagtacttttgactgtctgtctgcctggagagagagagagagagagagagagagagagagagagagagagacattaaagtaattgttaaaattcatgtaagtaattattgcaagacctgagactataactccttaccttaagccagaatatgctgctgtaaggccagactagcttctttctacacctccaaaaggtgggttggtttggggtggttgatggtaatctggagatgttggtctacactatacaacattggtagaaagaatgaattaggtgattacctaatgcaattcaaagtaacctttgaaaatctgggtccaggccattactactttaaagaaataaagagagaatgcattgatttcagttctaagtgatttagacacctagaactttttctttcattctgagagtgttgaacttattgaatgaaaccagaacttgtcctgtacccagacaggattagaccagactcctgggggcaacaccaaagtacatgagatgccctgttcccaaactattttttcttggcaactttcttctctcaaatatagcagaactttatgtgtgggcagtggggatgtatgaaagtctgctttgttcctgtttactgtccactcagggccaaatggcatttcatttcattcattgtccatttactgggagcaaggagagcacttaacaagaggatggaaactagagtctgggaaagtaaactagaggctgggaaagtaaactagagaaagtccttttgtgtccggaattggttcctttcagtgggttcttggtcttgctgacttcaagaatgaagccgcggacccttgcggtgagtgttacagttcttaaagatggtgtgtccagagtttgttccttcagatgtacagatgtgtctggagtttcttccttctggtgggttaatggtctcactgacttcaagagtgaagccgcagacctttgcagtgagtgttacagctcttaaaggtggcgtgtctggagttgtttgatcctcccggtgggttcgtgatcttgctggcttcaggagtgaagctgcagaccttcgcggtgagtgttacagctcataaaggtagtgcggacccaaagagtgagcaacagcaagatttactgtgaagagcaaaagaacaaagcttccacagagtggaagaggacccgagcgggttgctgctgctggcttaggtggccagcttttattcccttatttggcccagcctgcgccctgctgattggtccattttacagagcactgattggtccattttacagagcgctgattggtccattttacagagtgctgattggcctgtttttacagagtgctgtttggtgtgtttacaaaccattagctagacacagagcactgactggtgcgtttttacagagtgctgattggtgtgtttacaaacctttagctagacagagtgctgattggtgcgtttacgctcctttagctggacagaaaagttctccaagtcccacccgacccagaagcccagccggattcgcctctcaccttgacctgagtctaaggggagtagacattaattaggtgtaagtgggaaacaccaagtataaatgcccagagaactagaaagactgggaagcacagtagctgatgatgaaaggcaagtaggcccctggccatgtgaaactttggagtccacgttcagagttcttttctaaatcaactttattgaggtagttagcatacagtaatatgcacccatttaatagtacattttgatgagttttgacaaatttatacacatgaataattaccaccaaaattaagatccctcactcttaaaagttctatagtgtccatgccagctaatctttctcaccttcagcctcaggcaatgactgatgtgctgtcattacagtaactggaatcatatgcttcttttatgtaaaagctttcttcatgtaacaatgcctttgagatccatccatgttgtatgtcagttgttaatctttttattgttgaatgttattcctttgtatagctgtaccataatttattagatcatatgttggcaatttgagttgtttccatttttggttcatgtggttaattaaagctgctgtatctttctgtggacatagattttcatttcttttgggttgataccaagaaatggaattgctgtgtggtatggtaagtagaaactgccaaactgttttctacagtgcttgaccactttattttccctccagcagtatatgtgtgtcccaatttctcctcatccttgccagcacttagtatcgtcagtcttttaaattgtagctattcttaggggtgtgtagatgtatctcattgcaatgtcaatttacatttcacattgagtaatgattttgagcatttttttcttatggttattaatcattcatatatcttctttataaaatgtctaaaatttttgtccactttttgtttgtcttactgagttgcaagagttgtttatattttctgaatatattttcttttgtcagatacacatatttcaaatagtttcttcctgacagtggcttgcctttttattttcataatgtctcttgaagaactgaagttttacatttcgatgaagtcatattaatattttattttattgtttttgctttttttgtgtcctatctaaggaaattttgcctacctcaaggttgtgaagatgttctttatgttttcctgtaaagactttatagtttcaggcctattacctattttctgttaatttgtatgtatggcatgaaggcttgaggtcatcttcccacacctctctcatgtgggtatacagttgttccagcatcatttgttgaaaagactcttttatctatagaattagtttgtctaaaattaattgactgtagatgtataagtctgtttctgggacactatttctcttccattgaactctatgtgagtaccacacagtcttgctcattataactttatattatgtattaaagtctgtgttgtaagcttcccaacctttctcattcttagttttatttgttgcgagttctttgcatttccatctgaattttaggattagtttgtcagtttgtagaaaaatgcatgcccaggctggacgcagtggctcacactggtagtcccagtactttgggaggttgaggcaggaggatcacttgaggccaggagtttgagaccagcctaggcaacatagcaagactcagtttgtaaaaaaaagtaaaataaaattacccaagcgtggtggtgtgcacctgtggtcccagcttctcaggaggctgaggtgggaggattgcttgagcccaggaggttgaggcttcagtgagccgtgatcatgccacttgcactccagcctgggccacagagtgacaccccatctctaaaaaataataataaaaaaaagaaaaatgcattcccagattttgactgagaatgcctgaatatgtaaatgattttgggaagagttgctgttttttttgtttgtttgtttgtttttttgagacggagtctcaacttgttgcccaggctggagtgcagtggcaccatcccagctcactgcaacctctgcctcccaggttccagtgattctcctgcctcagcctcccgagtagctgggactacaggtacccaccaccacgcctgtctaatttttgtatttttagtagagacgaggttttggcatgttggccaagctggtcttgaattcctgacctcaagtgatccaccctcctcggcctcccaaagtgttgggattataggcgtgagccactgcacctgtcctttaggagttgctgtcttaagagtgagtcttcaataaacatggcctgtctcatggagtatcacttcatttatttagctcttctttaatttatctcagcagttatgtcacttttagtatacaggttttacacatactttaatttatctctacctagttcatgaatttttcatctcagggtataattgaaaaaacggaatagacttaaggtgtacaatgtgatgatttgatacatatatattgtgaaatgattaccgaaatcaagttagttaacacatctgtcacctcacgtaagttacctttttgtgtgtgtgtagaacacttaagatctactactgtcttagcaaatttcaagtacacaatacaatattgttaactatagtcaccatggaacatattcatcttataactgaaagtttttaccctttgatcagcatctcactttttcccccaaaccccatctcctggcaaccaccattctactctgtttctatgagtttaacttttttagactagttaaaaatgagatcatacagtatttgtctttctagtctagctttttttacttagcataatgctctccacctttacccatgttactgcaaatggcagaattttcttcttctttatggctgagtcatattccattatgtgcaagtatgtgtgtatatattcattcattcattgacagacatgtttccatgtctagtgaataatgttgcaatgaacatggagtgcagatatgtcaagatactgattttgtttccttcagatatatacccagcagtgtgatagctagatcatgtggtagctctatttttaattttttgagtactctttgtactgtttttcatactggctataccagtttacattcctaccatcagtgtgcaagggttctgttctcaccaacatttgttatttcttgtcttttttttttttttttttttttttttgtgatggggtctcattatgttgcccaggctggtctccagcttttttttcccccaagattgctatggatattcgggttctatatgaattttaggattgtgaaaaatgccattgggatttcgatagggatcacattgaatctatagatttctttggatagtatggacatttcaacaatatttttccaatccatgaacatgagataactttccatctatttgtgtcattttcagtttccttcatcaatgtcttacagttttgttttttgttgttttgtgatggagtgttgctcttgttgcccaggctggagtgcagtggtatgatcttggctcactgcaacctctgcctcccgggttcaagctattctcctgcttcagcctcctgagtagctgggattacaggtgcttgccaccacgcccggctaatttttgtacttttagtagagatggggttttgccatgttggccaggctggtctcgaactcctgacttcaggtgatctgcctgccttggcctcccaaagtgctaggattaccggcatgagccaccatgcccagccaatgtcttacagtttttagtgtatggatctttcactgccttggttaaatttatttgtaagggatttttttgtttggtatgctactgtaaatgggattttttttacatttatttttcagatagtttgtcgatttcgtatagaaatacaagcaaattttgaatgttaagtttgtaccctgtaactttactgaatttgttctaaccgtttttttttttttggtggagtcatcagaattttctatgtaataagatcatgccatctacaaacaatttaactttttcatttccaatttggatgccttatcttgcccagttgctcctgctaggactttcagtactatgttgaatagatgtggtgagagtgggcacccttgttactattcacctttgagaatgatgttagctgtgggcttgtcatatatggtctttcttattttttggggtacattccttctatacccaatttattgggcatttttatcatgaaaggatgttgaattttgtctttttctgaatctattgagaagatcatatgatttttatgttttattaatgtggtttatcacatttattgatttgtgtacggtgaatcatcttgcaccccagggatgaataccatttgatcatgtgtatgatctttttactctgctgttgatttcagcttgctagtgttttgttgagaacttttgcatctgtgttcatttggattactggcctatagttttcttgtgatgtcttcgtctggctttggtatcagggtaatgctggccccatgaaatgagtttgcaagtatttcctcctcctcaattttttttggaggaatttgtgaaggattggcattaaatgtttggtggaattcagtggtgaaaccatcaggtcctgggctttgctttgctgggagactttttattgctgattcagtcttattattctttattggtctgttcagattttctgtttcttcattattttatcttggtaggtcatatgtttccaggaatttatttattattctaggttatccattttgttgccatatagttgttcataatagtctcttatgatctgttgtatttctgtggtatcagttataatgcctcttctttcatttgtaattttatttatttgagtcctctctctttttttcttggctattctagttaaagttttgtttatctttccaaaaaaccaggttttagttttgtccatcttttctgttgttttactcttctctatttcatttatttctgctccagtctttactattttttccatatgctaatttgggtccagttttttttcccctagtttgctgagatgtaaagttaagttgtttgaggtcttttttttccccataatttagacatttatcaatataaactttcccacttagaacttcttttgctttatcccataagttttggtatgttgtatttccattttgttttgtcttagatgtattttaaatttccttttgacccattgattgctcaggaatgtgttctttagtttctatatatctgaattttccatttttccctctgtttttatttctagttttataccattgtggtcagaaaagatacatgatatgattttaattttcttgaatttaagactttttttgtgtgtcttaacatatttattctaaagaatgttctgtgtgtgtgtgacaagaatgtgtattttgctgctgttggataggatgttctttatatgtctattaggtccattttttctatagtgttgttcaaatctgttgattccttatgattttctgcctgcatgatctatctactgtcaagagtggcataataaagtcccctttattattatattgtcatttatttctccttgcagttctcttaatacttgttttataatgaggtaccctgatgttagatgtattactatttacaatagttaaatcttcttgatgaattgacccctctgtcattatataatgatcttctttgtctcttctgacagtttttgacttaaagtctactttgtctgatataaatatagccactctgttctcttttggttaacatttgcatggaatatctttttccatcccttcattttcagcctgtgtgttctcaaagctaaagtgagtctcttgtaggtagcatattcttggatcttaattttatatccattcagtcactctatatctttgtttttgttttgagaaggagtcttactttgttgcccagattggagtacactggtgacttgatcttggctcattgcaaccaccatctcctgggttcaagtgattctccaacctcagccccccgagtagctgggattacaggtgtgcaccaccacacttagctgatttttgcttttttattacagacagggtttcactgtgttggccagactggtcttgaactcctgacctcaagtaatctgcccgcctcagcctcccaaagtgctgagattacaggtgtgagccatagcacccagcctactctatatcttttgattgaataatccttttacatttaattattggtaggtaaggacttattattgtcattttattaatttttaaaatggtttgtagtcctttgttcctttctttctcttttgctgtctttctttataatttggtgactttttgtgatggcaggcttttatttctttctattaatcttttgtgtatctactgcaggattttgctttgtaattaccatgaggcttacataaaatataattattacatgttattttaagccagtaacaactcaactgtgtttgcatacaaaaattctacacttttactcccccatctctcatattttaggttattgatgttacagcttttaatattgtgtgcccattaaaattattttagctataattatttttaatatgtttgtttttaacttttatactagagttgaaagtgatatacataccaccacaagaatattagagaattctgattttgactatctatttgcttttaccagtgagttttatacatttatatgtttttacattgttaattagtatcctttcatttcaacttgaagaactttggcatttcttataaggcagatctttgtgatgatgaactcctttagtttttgtttgttggggaaagtctttctctctttcatttctgctgtacagctttgccaggtatagtattcttggttgaggatttcttttctctttcaatatattgaatatattattccactgtttcctctcctgcaaggtatctgctgaggaatccacttacagtcttacaagggctcttttgtatgtgacaaggtgcttttctcctgccattttcataattctctctttgtctttgacttttgacaatttaattatactatgtcctggtgtagacttttcagcctgtttggaaatctatgggtctcataactttgactgtcctcttcttttcctaaatttgggatcttttcagccattatttctttatatagatttttcagtctctttatctgtctcttttccttcggatacttctggaatgcttatgttgttttgctcgatggtgttccaggtatcctgtagactttcttcactctttgtttgtttgtttttgcttctctaactggataattttaagtgactcatctttgagttcactgattttttattcttctgcttggccaagtctgctgttgaagcatgctattaaatttttaaattcagtcattgtattcttcagctttatgattttttgtaaagagggtgcagggtctcactgtgtcacccagcctggaatgcagtggcacaatcatagttcactgtaacttcgaactccagggctcaagtgatgatcccaccttagcctcccaaatagctagaaaaacaggcatgggccaccacacccacctaattttttaaaaataacttttgtagagacagggtcttgctgttttgcttaggcttgtcttgaattcctggtctcaagagatcttctcgcctggcctcccaaagtggtaggattataggcataagccactgtgcctagctggattttaaaaatggtttttattactttgttgaacttattttgttaatgtattgtttttctgattagttgtctgtgttttcttgtagttcactgatttttaagagtattattctaaattctttgttagttacatatcttcatttgtttagggtcagttattacagctttattagtttccattagtggtatcatgtttccctgattctttgtgatcctcatatcattgtattagtgtctgcacaatttaggaagtgatcacctcttctagcctttacatgttcactttggcaaggaaagatctttactagtctgccaagcctgggcttctggttgggccagctggtagcatatgcaggtaagtgaggctggggtctctgatctggtggggctgctgccgttgctctaaggttgggtggagctctcttgttgggcaggccccctgactggtatctgaggtcaagtgggactgttggttgggctttgtaattgcctctggttgggtgaggctgcaggctgtgccccaaagttaggcggggttgctggctgggctctacagctggatggcattacagtcaggtagggatactgattggactccctgattggttggggctggaagctgtgccccactgtttgatgtagtcattggctaggctccctggttgggtgggattgcaggttatactctgggctgctggcttggttccctgcctgggcatggttgccatctgtgctttgcagctgggctggattgctgactgggaaacctagacacccagtactgccaaccatactccctggccagactgggtgccaggattgctttgcaggtgggaggagctgctgcctgggctccttgtcaggtgaagctgtcagcagggatgtgtggtgccattgccaagatacatgtgcttgttgcatgtggtctagtcctgacaattctcaatattctgtaggagaagagatataatttggccttttgggaagcatgctggaatattgggaaagctagatgttcaccttgtgctgctggtgaaaccatagactcagcaaatctctcttggcatgaggctgttttggcctggggtagtggcaacatcatcaaattgaaattgctccacttatacttccaatacaacttttctaagttttgtgcttctggaatttttgcaaagatgttcttgtatgtagatagttgctagttggtatttctgtgatggggactagagcttgggacctcctattctgccatcttgctgatgtcattcctcagaacacacatgtttttgatattactataaattgtattctttaaattttaattttttattgtttatttttagaatacataaagacttgatttttgtatattagccatatttcccgcaactttgctaaattaacttgttttctttttcttggttttttttttttttgagactgagtttcgctcctgttgcccaggctgaagtgcaatggcgagatctcggctcactgcagcctctgcctcctggtttcaagtgattctcctgcatcagcctcccgagtagctgggactacaagcatgtgccaccacacctggctaagttttaattttttgtagagatggctcttgctatgttgcccaggctggtcttgaactcttggactcaagcaagcctcccactgcagccttttaaaatgctgggattacaggcatgagccactgtgcccagctcttttagattcttaatgctttctctatatattatcatgttgtctgccaataaaggtagttttctatctgaatgcctataaattctttttcttctcttgcttagtttttttcttccccctgtgaacagtgttgaaactctatcaaatatttttctgcatctttgtggtttttccccctttttttcttatcaatatattgaattacattgattttttttaaacattaagccaaccttgcattccttaggaaaagtcacccttggtgatgatggtattctttttatatatcactttattgacccagtaatacattttaaaaataatttttatgtctatttttatgagacattggtttatagttttcttataatgtctttgttggattttagtgttcatgtagtatggtacctcaaaaaatgagttggaaattgtttcttcctatatttgctgggagaatttttataagatttgtattatttcttccttaattgttggatagagttcaccagtgaaaccatctgggcctatagtttactttatgggaagccttttaaatcacgaatttaatttctttagtaaatattggatttattccacttattattttttaaatttcttgaaatgttggtgatttgtctttcaaggaatgtttcaattttatttggtctattgcacaaaatattgacctattttttttaaacatctatagggtttgtaggatcttcctttattcctgacattggttaatttatttgttttctccctttgttttaatcagtctaggtagaagtctgtaacttattgacattttccctccaaagagccagatttcgggtggtttgattttcttatttttttttctgttttctcttcagtttattccctttgttgtttcattatttttcctgctttgggtttcacttgtgtttctttttctggcttcatgtgaagattagatcatttattattattattattattattattattattattattgacagggtcttgctctgtcacccaggctggagtgcagtggcacgaccatagttcactgtagtgttgaactcctgggctcaagcgagtctcccatctctgcctcctgagtagctaggactacaggtacatccatcatgcttggctttttatttttgtatggatggggtgttgctatgttgctcaggctggtctcaaattgctcaagcagttctcctgccttggcctcccaaagtgctaggattacaggtgtgggccattgcacctacctaatcttttttttttttttttttttttttttttactgcttttttcctaatacttttgtatttctaaggtttaaaccttccctctaaccactgctttagctgcattccatgaaccttaatatattgtgtgttcattttaattatatttgaaatattttctaatttcccttgttatttcttttgtgtcctatgggtcattcagaagcatattgtttgattttccaatatttttagattttccttttttttgctattgacttctgatttagtttcattttggtcacagagtatactctatatgatttgaattcttttaaactgttcagacttattttatgactcagcatatggtctactgtgaatttttcaagagtacttgtaagggatgtgtgctctgcagttgttgagtggagtatcctataaatgtccattatgtcaagttctataataagattttcctgtgatctttactcagtagatcaacaatttctatgactattactgtaagcaacagtagtaatagccactactaattattttttaattagtttactacataccataccctcttctaagcactttacatggattaatttgtgtaatcttcagtaatctctattgaggtgtaagtgccattattacctccattctctggatttgtacttaggcacaggtaggttattaggtggtggaccaggaattgaatctaagcagtttgaccctaaaacttacacataaaatgtttatggaaagtggaaaattatgataatctaacactaaaattaggatttttttttttcctgaaaactttttttcatgaacagtagttttttttggttatattcttcttcaatttggtttttccttacttgcaccatcttgatgctggtatcactatttaaattagttatatgaagagtttgtaaagaaaatctaaggacttgtaacattggaaacattgacagtgtacttgcccttactcctttaacaaaataggctcttggctggtaaaattcagtgatttatgatcctgatccatgaagagcactctgctcatatggggttatttgaaaactgtttgccaaaaagatttctgctctaaaagcctttctaaatgaatgaacatttggtattttcttgttacatgctaactccactggcttaaagctttactggttgttaaaatgtcaacatctccaggaaataggtcataataacttttactagttgtattgtccttattggtagtgactttaataagattctttcctttagtctaggttttattaggggtcaaggtaaagaaatgaagagggcatttctacttgaagtgtcactatattgagcaggaaaggccaaagtcctgtatcacttacaatttcactgagatgccggtattcattttagaaatgattttcaatgtttagtttagtttattaaacacttattgagtgcctacagtgtggtaggcattatgcattatgtgataggcattatgctatgttggggatatttgaatgagtattatctattctctgttctaaaacagtaaacaatatactggtaaaaatgttacaatactagatgataatggaacaatagaagtatatacatagttcagaagcagcactcactcatcacccttatcacccttattggagttcagttagacatcctaggtttgtatccagtttactctggtgtatgtttcacagctgtataaccttaggcaagatattagtagtctctgaaatggggattataattatgccaccccaaaagattgtcatagtgaataaatactaattcatttaagacccttagaacaatgcttgctacctgataaacaacaaatatgagttattattgttgttagtattattaattgactacctgtttgtcttctatctagtctgtattccttttgggcagagtcctttgtgtagtcagcctaacataaatgaattaatgaatcaatgaattgaagaactaattctggtggataggtcaggtgtttgaagtgtgacaaagcaaagaaggggatttcagtcagagacaatagttggttaacttcataaatctctgatccaacattgtatattcaggatttgtgggaaatcagatattgatggagcatcagtggacttgggtgggcaattactctgaacagatagataggtcattaccatgtcaggaatttagagactatcctcaggtacggaggaaccactgaagggttttaacttctgaatgactctagatttttaattgagaaaggtcactgttactacagtgaaaaggatatcgagactggtaaataaaaagtaagaaggctattgtggccaagataagaaatgatgatagcctcaagaaaggcagtggcagtgaggatggtggaaaagacaaatttgagagatgttagggaagtaaagataaacaagatttggtgtctgatttcatgtgaggttgagggaaaggaagaaaggtgtgattattttcaggtgactgggtggttgttgatgctcttgattgagatagagttcctgaaagaaaagttttgaggtgatgaaaggtagtgaagtttttgatacattgaatttttttttttttcttgagacagagtctccctctgtagcccaggctgcagtgcagtagtgtgctcttggctcactgcaacctctgtttcccaggttcaggtgattctcctgcctcagcctcctgggtagctgggactacaggtgcgtgccaccatgcccggctaatttttgtatttttagtagagatggggtttcaccgtgttagccaagatgggctcgatgtcctgacctcatgatccgcccaccttggcctcccaaaatgctgggattgcaggcatgagccactgcgcccggacttttttttttttttttggagacaaagtctcactgttgtacatgctggagtggtgtggcgcagtcatagctaactgcagccttgaactcctggtctcaagcagtccttctgcctagcttcccaagttgctgggactacaggtgtgtgccaccacacctggctagtttttctttctttcttttttttgaaatggagtctcactctgtcacccaggtcagagtgcagtggcgccatctcagctcaccgcaacctcctcctcatgggttcaagcgattctcttgcctcagcctcccagcagctgggactacaggtggccaccaccaggcctggctaattttttttgtatttttagtagagacggggtttcactatgttggccaggctggtctcaaactcctgacattgtgatgcacctgcctcggcctcccaaagtgctgggattacaggcatgagccaccgcagccagcctttttttttttttttggtagcagtggggtctcactatgttgtccagtctagtctcaaacacctgagctcaagtgatcctcccaccttggcctctcaaagtcctgggactataggtgtgagctaccacaagtggcctgataatgttgaatttattgttcctgtgtgactcccaggtagagatgtttagcaagcagttggatatttgtaacctaagcttgggaaataaagatttaaaaagtggtcagtgttgagaatgatgaaaagcagtagatgaaatcacccagagcctaagtattgaatgaggagtgaaggctaagccttgggaaacacagacgtttaaaaaattggagaggaggaggattgagccaaataaatatagaaggataacacagatctgggggtaaaatcataagaacatgatgtcaggaaaggcaagagaggaaatagtttccagcaggagagaatgcctaaagtatcagttactgcaaggagcttatttagggatttaattggtaaataagagacagtgttcttaaactcttaagacttggacaatttctgaggaatagtgggacagaagtcagattgcagttgatttagcgttagttgatttaactcccagccctctgtgcatctggagacaaaagagatgctgggtacaaatccaaagtattaggatagattttactttattttatgtaatttactctcttcttgtacttttcctgagtttggaagccaaactcttctgctagtgatactactgaatgaacattccattaaaatatggactcaagtgtaaaaactgcttgtcgccaacatttataggaattgcgtaacagatattttagaagttaatttcttcggcagatttggtgtaattcagaaattatgcatcacttggtattttctttttttgtaatttattgaaggtatttgaagacagctgaaagaaaaatgagaatttcggaaagttcccttgctttcagttttatgtgcttaacatgtcaattcaaagtttttttaatgagtttttaaggaccccaatatagaattcatattggaaatactcataactttatgttgataccagctgttgctactctgataaattgcttaagaaatgatttaatgggctattatttcttctcctgttactggaaataaatgtcatgcatctttatccataaggtgtttagtgacaggattctttgatagggaactgattataatacaaataaaaaacaagtacctttttaagtatttgttttgttttggtttgctttgttttaccttgcataattttttgaattatggaataattctgtattctgctggtgatgtttaggcaaaacaatgataagacaccaggcacatttaggtgctactacttatttctgagtatgtactatattgtattgaagtgagttgtaagggagaaaacatttcttagtgtcttaggtttatggctaagactccctataacaaaagacagaataacaagagaaaaacatagaaatttatttaagttttacatgacatagtgttgcaggttttctttagttcagctaaagacggggtccttgtctgtcccacgccacagaaatttcggcttgcagatggtttgaagggtgagtaaagcaggattttattgggtgaaaaggaagaaaagggggaagcagggactctcgctaggccagagtgctagagcgcctcccgccggctcttcaaattccaggttccacacaggaagaggaagggccaggttcctcctgctgcaaacagggcgaacttctcgagttccactccaatgagcattacggttggagtttttctggggcggcccttgcacctggctgtctcattcccctctctaaagaagtatatctaactgctgttagattaaggataaggactaagaccgatcttaactgcttcctgctgatagggggtgctgttttgggggaaatggcagagctccctcagagacctatctaagggtttccagcagaaggggccatcgtcagaggctctggttgcatgattgtttggagtttgatggcctgaaggcaagaatagacaaaccgggttattagaagacatatataaaaatgaaacaagggcacaggtaagggcagctcaaaaatcccaaggccggagggcaaaagcctgactggcaaaaacactttacccttttgctggcatgttgggtttttgggttccctttccctgaggccaatcctaagccaaccagtgtaagggctgggaaattaactctttccagtttggaggatgcatccgagggacgtgtcccatagtacagagacacagtcacctatcagtgaagagaggacagaggagaaaaaaggaaaaaagagggtgccttttaaaggactcctaggggtccagggtgtattttaaaggggaacagactgaagataaatggctacccatctagaaagaggggagcaggcgtccctggttcccttctcttcctagcagatacccagggtacctgagggagagagggaagagcgtcctctttccgtcttctgtccttgcatccccgagttctggtgaccttggcaggtgccaccatgagtaccaaagctgcttgcactcatgaagcagggggacctgagaattggaattatctgctctcacctatgtctctttctcacctactgtcagtagccttggagttccctagacctgatttatgccatggatactgatgtggcctttatccaaataggaagcttgggcttggcttaataggaaggaatcagccacactcacctgcgctgtgccttttaacttcccttattgtctgcctttggatccttcagatccaattttctttcctatggctttgacccaaaatttggaattgagtctggggcagaaatgtgtcttaagggggttgaatggactccttatcataagccaaatgctaaggtgaaactgtggaactgagtcctcctccaacaagggagaggaaaggatgtcttgtgacacacccagataactggtgctaagatctgggtacatggtgcctggctttgtttacctcccttggtcttactttcccaaaaggaaacctctgagtgatgatcatcctatttattcccatcatctggcaggatttgcaggataattgctcagaactagaatattgatccagacttgtacattacccatcccttttgttctttctgagctgcagccagaaattgctggttagttcacaggaacaagcagggttagtctaaaatgtaggtgaaaacttaaaaacaacgaatcagtttagaatttaatggcaaatataagttttgaaacgtgatttctctctgtctagtcctcatgttaaaaaacaaatcgtcataggactgagtggtttgcaaaatagactttagttttatacttggcctgattatttgcataaagtgcagcaagaataattatttctacataggccttttggattggttttgatggaagtttgttccataaggaatctcagataagaccttttaagtctgagcctaatcatgggtttgtatcctcaaacacttgtgagttgggtgattctctcctcttagggtcccaagataaacttggagctcctggacctgttagcaagtgacattctttactgaccacaggtcaggaactctgtacagggactgtgtagacaagggtaggtggccagtttctcactgggcttttatgggctctgcaatttgagattgactcagcctcagtaaaataaccactttctccaattgtgctctgttgcaaaagaaaaatgaattcttactgcactgatgcaaacagctatattgccataagaaggctcacagatagttttcaaattctggcggaaccaggcagagagaaacaaacatgctccaaatcttgatcataggaatataccttactcaattattaaaggccataaatagttcaaaataagtttccttgactctgaaaaacaaagcaaggatcagcagtattccaagtaaaagtcaaaaaggttgctttggctttctgagttcagtgcatttagttaactcttgttttgcttgatattcatgaatatttcagctcttcatgagtcctgtacattttcctttattaaaatgttacagtctccaaagttatcagaagtctgtgtttgagagcgactgttaaagttctatagcttattataaaccatcttttgaaaaggattaaaataagacaacaattgtctgtgagtagcaaaatacccagggtggttacagttagaaacacaattgacaaataagtgtggttatttctgtggtttatgataacttaacattgattatggttgacagcatatacttagacattagaattttagaaatcccgtatgatttttgaacatatattatcattattcacaaaaatataacctaaagaagacagaacatcattttggcaatcccatatacctaaacatgtcaaataatcctgtttacctctctttttctggacacttcagggtcccctgaagtatttgaaaagccaggtgctggctgggagtggtggctcatgcctgtaatcccagcactttgggaggccgaggctggtgaatctcctgaggtcgggagtttgagaccagcctggccaacgtggagaaactccatctctactaaaaatacaaaattagcaggttgtggtggcgcatgcctgtaatcccagctacttgggaggctgaggcaggagaatcccttgaactcggtggtggggtggaggttgcagtgagccgagaatgtgccattgcactccaccctgggtaacaagagtgaaactccatctcaaaaaaaaaaaaaaaaaaagtgaggtgccagggaacacggttttgaaactgaagtttgattttgggaaggctgttaaatgttcaaggtttaaaatacttgaagccaggcctggtggcttatgcctgtattcctagcactttgggaggccaaggtgggtgaaaccccatctctactaaaaatacaaaaattagctaggcatggtggtgggtgcctgtaatcatagctacttgggaggctgaggcagagaattgcttcaacctgggaggaagaggtttcagtgagccaaggtggcgccactgcactccagcctgggtgacagagtgagactctatctcaaatgaatgaatgaatgaatgaatcaatgtctgagaactgaatgacaagaaggaactcaccatagtgacacaggatttttcttggtcactttgccagtcggagacctctggttggtaacacccctgtccgggttttgctgggcctgggttcatcacaggagatgccccacacttggcctgccagttcatgcccggtctgcagtttgtcatggatcccacggccactgtgactgtgtattcaacctctggttggaggtggggtgtgagcaagcaagtgtggggtctggccagttgttccaagtgctgacacagaagcaggctttgtgcagtgcttgttgctggactaggcatgtctcaagcccactcctgtgatggtctctgatgtccagatagaggacacagcacccaggcaggggtgctgtgactccgaagcccctgagggggtgttacagcatgctaattagctcaaggggctgaaagagctgttaacacaccgccatctggaatggatggcggtgtgttaaccactctttcagccccttgccccagtttggcctgtggctgcaggcctggctcagccccattgctgctttctgttgtgtggggcagctgccctctgccagcagagggcagagggccacaatgttacagccttctgtgtacccagtttcagtgggtcctgagttcttgtcccatgaccaagaagaataggatcacgctgagaattgaagagtgaggaaggtggagaatttaattgagcaatgaaacagatctcagcagagaggggacacaagggtggtcccctacccaaagtcaggtggcctctctcccattgtggctgggtccagggcttttatgggctcagattggggagtgtatgctgattggtttgtgagtatgcaaaaagattaaaacaaaggcaacactcaaagttgggcatgacagtgtaaaatgttaattagggaaggggaggtatatgtaaaataggcgaaggctggggatcaatcagaggaaagtgtgccaaatgggaagacagattctcagtccggttggtggatttgacttgtaacttgtctttcaggctttaaactgccttttggcttgaaggtggggtttcactggggacctgcccctgtctgcctaggatttgtctgcctcctgccactgtcaatataaagatccagggaaagacttttcaaaggatcagctaatgtaaaagttctaagatacggacaagcttggattgttgttaggattgaattcttgctatccttattgttattaccatagtaattattttttcaggatttccagagtagtggtagattaggacacagaagccacttttgctgcttcattattcctgaacattacttgcatattgtactataggttagactctctcatgcctcatagtgttacatcaacagcacaaaatgataacaagaaataacacttgttattactgtgtactgagcatttttctaaatactttacttgctttttgtgtctggcttgggacagaatttggattcagaaaagagagaggtctcaagaaacaagagaggaaggaaagttagaatgaattgagaggagccataatggtaaaaagacatgaaatggtacttcaggtgaagagttaaggaggagcagaaacttttctcttgataaatctgttttccacatgccaacttcctgttttttattttcaggcaagagatagtttggagagaagaggcttgcccataagaaaaggataggcttcaggtcaggacaggagttagctgttctcagaagtttctatgacttgactttcgatacagggaagtaagctacttttttgatctgtgctaagtgtaggtttgatattaaaatatcaaatgttttcttgccctctcctccaaatatcttctttgcttttgagtgccttgacattcctttaagttggagacaaaacttttaatcaactattaaagttaaaaagcataaaaggaaaattcctatttgaagatgcatgttggtttaaacctacttaaatcaaagtatgatcagtcagtaaataaccaaaagtaaccaaataataagaataactattctaactgcagaaagatgaaaattaacaaggttgtggagtacttataaagttgtgagaaaatatctgttgggggcattttctttttttttttaacttagtgcttctgattagcattggcgttctttagtgtcacctctgcagaggtaaatagaagctgcttggacatgtattttttttcatgtgatttaatgtatctgtagcttagtgagaatatttgattctgttacatgttttatatagacattcttgttgaaaataacaggtcttgtaggcaatggttctcaattcagctttgcatcagattaacttgtgaaccttaaaaaaaaaaatccagattcctaaatcctgccctaaggattaggcattagtgtttaaaatataaaaagcctcaggtctggtttcctcatttatagccactgttgagacttgtaactttagagaatttatagagatatcagcatattgtactttgtatttaatatttgatgatggcatgccatattgaaaaaggttttagaatttatttgcataaatgtgatgaatctttgtaatgtgacttagccaacgcacatttattgagctcctgtttacatgttgctaagctgtaatgaatgctaatatgaaccaggcaattttctttacaaatacagattgattttttagttatctaaaatatgtgaatattgggaacaagtagtgtattttaataaaaatacacttatttgaaactcagtttttaggtgcaatatttagattctatatgagatcaaagtagttcagattctgcttgtataggaaactaagtgcagatgaaatattttaccactattgtacaattttgtactacaacatcagagttgagttgtttatacaaaacatttgtcaacttctgagaaagacagttatattgtttgtaaataagaacagttttatttccaatctgtatactttttcttgccgtaatgcactggacagggcttccatgggatgttgaatgagagtggtgacagtggactttcttccttctttctccatctcagggggaaattattcagccttttacctttaaacatagtgttacttgtagatttttcttagatactctttatcaggttgaggaaacgtgcttgtattacttgtttactgagcatttttaacatgaatgaatgctgaattttctcaaatgccctttattttgattatgacattaattgatatgaacataaggtctttcttctttagtctattaatatagtggattatgctgattgatttttccaatgttgaaccagcttggcattccccaactaaatcctattggttgtgatgtattttgtatgtgtatatgtataaaatttgtaatttggtttatatatatttgatttgaaatatatttgaatatatatttatttgaaattgttttatgtatatgtataaaatgattcgatttgctaatatatataatttataatttgattagcaaattaaatccatatatatttatatatgtaacccacatatatatttttatacatatagcaaatatatctttaacaaaaaatataacaactatatctgtggctacctatcagggatgggtataatataggaaggcatattggtatgcatgtggttccccaactgtatacagttgtaaaaattctttgagctatatactttaggttcgtgtaaggtagtcagttaagagtctagcatcacttgcttatctgtctgtcctagaacctctggtgtctcaggtttttctgatgaaaagaaattgagttctccaaaaataattagtaggtttcatcatattagttaaaaataatactagaggaacataaatttagaatatcctgtgaaggacagtgcaccttaaaagttttcagaacctcagacatgctgtagatcaaacacaacacgccattcttcattgcagctcttttgaatgcattatttaaatactatctttcaatgtttccttcagatttctaatacttaaatatactgttatatttttctcagtctgagggaaaaggccataccaatgctggagatgcaatatatgaggtggtgagtctacagcgagagtctgacaaggaggaaccagtcactcctactagtggagggggtccaatgtcaccccaggatgatgaagcagaagagggtaagaagttggacttactcagtttattctgtctgtatagctgctttacttacaatcttcagaggaggtgtgtgtgttgtgggtagaagtggtggttattcctaacctctgttaccattaggccaaattctacaaggtgcagaaaagaatttggttcatttggttcctaagttgcatagtctccagtgccacttttgcaactatttaaatttgacagcatcacttggctgctgttgttttctattttatttcaattatttttattttttattttcttgagatagagtctcccctgtcacccaggttggagtgcagtggaaaatctcggctccctgcaacctctgcctcccgggttcaaacaattctcctgcctcagcctcctgagtagccagatacaggtgtgcgccaccatgcttggctacttttttttgtatttttagtagagatggggtttcgccatgttggccaggcttgtctcaaactcctgacctcaagtaatctgcccgcctcagcctaccaaagtgctgggattacaggcgtgagccactgcacctgccctcaattaattttttaaattttttagttgtaattatagccttttttttctattttattttttctattttattctttgcatatatatatatatttttaatactttaagttctagggtacatgtgcacaacgtgcaggtttgttacatatgtatacatgtgccatgttggtgtgctgcacccattaactcgtcatttatattaggtatctctcctaatgctatccctcccccctcctcccaccctataacaggccgcagtgtgtgatgttcccttcctgtgtccaagtgttctcattgttcacttctcacctatgagtgagaacatgcggtgtttggttttttgcccttgcaatagtttgctgagaatgatggtttccagcttcatccatgtccctacaaaggacatgaactcatcattttttatggctgcatagtattccgtggtgtatatgtgccacattttcgtaatccagtctatcattgttggacatttgggttggttccaagtctttgctattgtgagtagtgctgcaataaacgtacgtgtgcacgtgtctttatagcagcatgatttataatcctttgggtatatacccagtaattggatggctgggtcaaatggtatttctagttctagatccttgaggaatcaccacactgtcttccacaatggttgaactagtttacagtgccaccaacagtgtaaaagtgttcctatttctccacatcctctccagcacctgttgtttcctgactttttaacgatcgccattctaactggtgtgagatggtatctcattgtggttttgatttgcatttctctgatggccagtgatgatgagcattttttcatgtgtctgttggctgcagaaatatcttcttgaagtatcttatgagaagtttcaaatgatctcctgtgactttagaattttcatgattgttacgtcatgtcctgtttctcatttgacatcattcaattcttgtttttttttgttgctgtaccccttaccactgcttttttttggaaatagtggggtatctgctctatttactacatggttgctgctgagcaataactgacctcacaaaaagcacatatcatatggctctgtgctcaatactctttttatacaaactagagctaaatgacagatgtttacttttaagaccttgtatcatgtgcttctagggtatggtttattaatagtaaatttcttaatttttattatctttgaaaaaagcatcttagaattctcagtcttgcttctgtatgaaactgtttttttctatgattgccataaacataataattatttttagctaatatttatttagtgcttactatatgctaagaacattccaagtatttcaaatatgttaacttatttgagtcttacaatcccatgaatactcttattaacttggttttaaggatgagaaactgagacacagagagcatcatcacttgctaagctcactcagcttaaagtgacaaagctgagatctgagtccaggctatctgactttaagatttgtacttgtaactatgacattattcggtcaagttagtcagttgactaaaacatgagaacagctcacttttaaaactaaggtaaaattcacataacatgaaaataacatgaaaacttaaacatgtacaactcagtggcattttagtacattcacaattttgggcaaccatcacctctatctagttcttaaacattttcgtcatccaagaggaaatattatacctattaagcagtcactctctgttctcccctttcccttccccctggcagccactaatctgctttctatctctatggctttacctattttgcataattcatataaatggaatcatacaaaatgtgactttttgtgtctggcttctttcacttagcacagtgttttctgagcatattgtttcatctacattgatacatgatatagcaggtgtcagtatttcattccattttatgactgaataataattgtttagataaagcacattttgtttatccattcatctttcagtggacactggttggttccatattttggctattgtgaataatgctgcagtacacatgggagtgcagctgtccctttgacatactggttcatttcctttggatatatatgcagtagtaggattgctagattatatggtagttctatttttaattttttgaggaaccaccatagtgtttttcatagtggttgtaccaatttgtatatctaccaatagtgttcaagggttcccttttctccacatccttggaaacacttacttttgctttttggtaatagccgttttaatgggtgtgagatgatatctcattgtagttgtgatttccatttcccttatgattagtgatgttgagtacctttgcatatacctgttagtcatttgcatgtcttcttttgagaaatgtctatttaggtcccctgtccatttaaatttttttttctttttgctattgagttgtgcaaaattcacatatatatgtgtatttacatatgtatgtgtatatgtatacaggctgtatacatatctgtatatatacacacacatatacatatatgcatatatgttatgagatgtgtgatttgcgaaatactttctctcattctgtaggttgccctttcatactgttgattgtttcctttgttttgcagatgttttttagtttgatgtaatcccatttatctatttttgcttttgttccttttgcttttggggttttatccaaaaaatcattgcccaaaccagtgtcatggagctgctcccctttgttttcttctagtagtttaatttaagtctttaatccatttttagtttatttttatgtatggtggtgtgagataaaagtctaatctctaatttcattcttctgcatgttgtggatatccagtttttccaaaaccatttatttgaagagactgttctttccccattgtatgttcttggcacctttgttgaatgccagttggctctaaatacatggaattatttctgttctgtttatcccattggtctatatgtctgtttttatgctgatctcatgttgttttggttactttagcattgcactagattttgaagtcagatagtgtaatgcttccagctttgatctttttgctcaagattgcttcacctatttgggatcctttgtggctctatatgaatcttaggatttttttttctattactgtgaagaatgtcattggaattttgttagggattgtgttgtgatctgtagatttctttgagtagtatagacatttaaacatattaattcttccaatccatgtacacagtatatcactccacttatttgtatcttcttaaatttctgtcatcaatgtcttatagttttcagtggagagatctttcacctcatgggttaaatttatttctaagtatttatcttttgtagctaatgggatttaaatggggtttaaaaaattagttttcagatagtttgctgttactctgtaggaattctactgatttttgtatcctgcaactttactgaatttatgtattaattctaacagtttttcgatggagtgtttagggtttgctataaataagataatgtcatctgcaaaccaggacaatttgatttcttctccaatttgtataccttttatttctttctcttgcctaattgctttggccaggactcattactattttgaatagaagtggcaagaataggcatccttgtcttgttctgaatcttagaggaaaagcttttagcctttccccattcagtataatgttagctatgggtttgacatatatggccttattttatccaggtatatcccttctatacttaatatgttgagagtttttcacatgaaaggatgttgaattgtgtcaaatgcttcttctgtattagttgaaattatcatgtgatttttatccttcattctgttcatgtgatgcattacatttacagatttgcatatgttaactcattcttgcatctcctggatgaatcccacttgatcatgatgaataatctttttaatgtgctgttgtgtttggtattctagtgttctgttgaggttttttgcatctgtgttcttcagaaatattggcctgtagttttcattttttgtagtatccttgtctgtgtctggctttgatattagtgtaatgctggcctcataaaatgagattggaattactctgttctcttgaaatttttggaaaagtttgagaacagttggtattaattcatctttcagtctttgttagaattcagcgatggagccatcaggtcctgagcttcctttttttgctgggagactgtttattactgatccagtgttattactcattattggtttgttcagattttctatttcttgataattcaatcttggtaggttgtatgtgtcaaggaattattcatgtcttctaggttgtttaactgtttgaatataacggtctataacagtattttatgattctttgtatttctgttgtatcagttgaaatgtctccttggtgttcaggagcatattgtttaatttccatgtatttgtgaattttccgaagctttttctgttattaatttgttgttttatactattgtggttgaaaaagatacttgatactatttcagtcttcttaaatttgttaagacttgttttgtggcctaacatatgatctgttctagagaatgtttcatacacagttgaggagaatgtatattgtgcagttgttagatggaatgtcttatatattatttagtctagagtgtacattaagtctgatgttcctttattgatattctgtctggatgatctgtccattgctgaaagtgggttgttgaaatctcttactgttttttgtattgcagaatatctcttcagatctattaatgtctgctttatatataggtactttgatgttgagtgcatatatttacaattgttatagtctcttgctgaattgacctttttattatataatcaccttctttgtctctgaatttttttaattttattttttgtggacacatagtaggtgtatatatttatggggtacatgaggtattttggtaaagaatgcagtgtgaaataagcacatcatggagaatggagtatttattctctcatactctttgagagtattctctcatactcatattctctcatactcattctctcatataactctttgagttacacacaatccagttatatttttaagttattttaaattgtacaattaagttattattgactatagtcatcctgtgtgctgtcaaatactaggtcttattcattctttcaattttttttgtacctattaaccatccccgcctccccctgcaacccatcactactattcccagcccctggtaaccatctgtattagtctgttctcacactgctgtaagggtactacccaagattgggtaatttataaacaaaggaggtttaattgactcacagttttgcatggctggggaggcctcaggaaatttacaatcatggcggaaagggaagcaggtactttcttcacaaggcggcaggagagagagtgagagagagaaaagggaagagcccccttataaaaccatcagatgtcatgagaattcattcactatcatgagaatagtatgggggaaactgcccccatgatccagtcaccttctactaggtctgtccctcaacaactggggactacaattcaagatgagatttgggtgggggatgcaaagcctaaccgtatcatcatccttctactctctgtgtccatgacttcaattgttttgatttttagattccacaaataagtgagaacatacaatgtttgtctttctgtgcctggcttatttcacttaacataatgatctccagttcaatccatgttgttgcaaatgactggatctttatttttatttttttgagatggagtttcactcttgttgcccaggctggagtgcagtggtgcgatctcagctcactgcaacctccgcctcttgggttcaagcgattctcttgcctcagccttctgagtagctgggattatgggtgtccagcaccatgcctggctaattttttgtattttagtagagacagggtttcgccgtgttggccaggcttgtctcaaactcctgacctcaggtgatccacccaccttggcctctcaaagtgctgggattacaggcatgagccaccatgcccagctgacagatgactggatcttattcttttttatgattgaatagtcctccgttgcatgtaagtatcacattttctttatccatttatctgttgatggacacttgggttgcttccaaatcttagtgattgtaaacagtgttgcaacaaacacaggagtacacatatctttttgctacactgatttcctttcttgttggaaatatacccagcagtgggattgctggatcatatggtagcttaatttttagttttttgaggaacctccaaactgttctatatagtggttgtactaatttacatttccaccaacagtgtacaagggttcttttatctctacatcactagcatttgtgattgcctgccttttggatgtaagctattttaactggggtgagatgatatctcattgtagttttgatttgcatttccctgatgatcaaagatgttgagcatcttttcatatgcctgtttgccatttgtatgtctttttttttcttgagaaatgtctattcaaatcttttgcccgtgtgttaatcagattattcgatttttttcctacagagatgtttgagctgttccttatattttctggttattaatcccttgtcagataggtagtttacaaatattttctcccatcctgtgagttatctcttcactttgttaattgcatcctttgctgtgcagaagctttctaacttgatacggtctcatttgttcatgtttgctttgggtgcctgtgtttgtagggtattacccatgaaatttttgcctagaccaatgtcctggagattttccccagtgtttcttatagtagttttatagtttgaggtcttatacttgagtctttaatccgttttgttttgatttttgtatatggtgagaggggattagtttcatccttctggatatggatattcagttttcccagaaccatttattgaagagactgttctttctccaatgtctgtttttggcacctttgtcaaaaaatatttcactgtagacgtatggatttatttctgggttctctcttcagttccattggtctatgtgtctgtttttatgccagtcccatgctgttttggttactatagctctgtagtatagtttgaagtcagttgtgattcttgaactgcctcagcctcccgagtagctgggactacaggtgcccaccaccacgcctggctaattttttgtagttttagtagagacgaggtttcaccgtgctaggcaggatggtcttgatctgaccttgtgatctgcccgcctcggcctcccaaagtgctgggattacaggcatgagccaccaccacacctggccataaatgggattattttttaaaaattcttttccacgttgttgacaattggcatatgtaaatgctaccaatttttgtattgtaatttggtatcctgtaactttattgaatttgttgatgagttttaatagttttgtggtggagcctttagggttttccaaatataagattatgtcatctgcaaaaaaggataatttgacttctttctttccaatttggatgccctttatatctttgtcctgtctcattgctctagctaggacttgcagtactgtgttgattaacagtggtaacagtgctctagctaggacttctggtgctatattgaataacagtggtgatagtgggcatcctggttgtgttccagatcttagaggaaaggctttcagtttttctccattcagtatggtactagctgttggtctgtcatatatggcttttattatgttgaggtatgttccttctatctcaagcttttttgagggtttttaatcatgaagggatgtggaattttatcaaatgctttttcagtatcaattcaaatgatcatagtttttttccttcattctgttgatacgatgtatcacattgatagatttgaaccatccctgcatcccagggataaatctcaattggtcatcatgaatgatctttctataatgtattgttgaattctgtttgctggtattttgttgatgatttttgcgtgagtatttatcagagatattggcctatacttttcttttttttgatatgcgtttgtctggttttggtatcagggtaatactggccttgtagaatgagtctggacatttggaagagttccctcgtcctctgttttgcagtagttcgatttggattggtgttagttctttaaatgtttgatagaattcaacagtgaagtcatcggttcctgggcttttctttagtgggagacttcttattattgcttcaatctcagtacttgttattagtctattcaggtcttggatttcttcatggttcaatcttggtaggttgtatgtgtctaggaatgtgttctattcttctagattttccaattcattggcatacagttgcgcatagtaaccactgatgatcctttgaatttctgccatctcagtgataatgtctctgttttcctttctgatcttatttatctgtatctttttgctttttttcttagtctggctaaaggtttgtcaattttgttgaacttttcaagaaaccagtggtttgtttcattgattgttcattttttaaagtttcaatttatttgttctctgatctttattagctctttccttcaactaattttgggtttggtttgcttctgcttttctcatttttttaagatgcatcattagaaggtttatttgaagttcttcctttttttgatgtagacagttatagctataaacttccctctttgtactgcttttgctgggtttcggtatgttgtgtttccttaatcatttatttcacgaaatttttcaatttccttctcaatttcttcattgacccactggtcgttcaggagcgtattgtttaatttctctgtatttgtatagtttccaaaattcctctttttaacaatttctagttttattccactgtggtcgagaagatgcttgatattatttcagtttttttggaatgttttaaaacttattttgtgacctaaaatatggtctgtccttgagaatcatctgtgttctgaggaaaagaatatgtattctgcagccattggatgaaatattctgtaaatatctatgaggtccattaggtctatgatgcagattaagtctgatgtttctttgttgatttttttgtctagaaggtctgtccagtgctcacagtgggggtttgaaggtattattgtgttggggtttatctttctctttagctctaataatatttgctttgtatatcttgatgttccagtgttgagggcagatatatttaaaattgttgtatctttttgccgaattgatccctttatcattatatggtgactttctttgtctctcagagttttctgtcttgaagtctatttttccactataagtatagctattcctgctcttttttgtttgttttcttgtttcagttggcatggaatatctttttccatctctttattctccgtctatatgtgtccgtgtaggtgaagtttgtttcttgtaggcaacagatcaatgggttttgctttttcattcatttagccagtctgtgtcttttgattggagagtttagtccatttacattcattgttatcatttctaagtgaggatgtacttctgccattttgtaatttgttttctgatcttctttcttcccttcctgtctttctatagtgaagatgattttctctgttgctatgatttcatttcttgcctttttttttttttttgagacatggttttgccatgttgcccatgctgtaggatcttttctttatccttagcctttgggagtttgattatcaaatgccttgacatagtcttctttgggttaaatgtgcttggtgttctataaccttcttgtacttgaatattggtatctttctctaggtttgggaatccatttcaatacattttctaccctatctctttctctacctcctctttaaggccaataatgcttagattcgcacctttgagcctttttaaagatcctgtaggcatgcttcattgtttcttattctttttctttttggcttctctgactgtattttcatataacctgcctttaggctcactaattctttcttctgcctcatcaattttgctattaaaggactctgatctgttccttagctccaattgcatttttcagctccagcgtttctgcttaatctgaaaaaattatttcaatctctgttatatttctatgatagatttgtgaattccttctttgtgttatcttgaatttctttgatttttctgaacacagttattttgaattctctttctgaagtttcacatatctctgtttcttcaggaatggtccctggtgtcttattgagttcatttggtgaggtcatattttcctggatggtgttgatgctagtagatgtttttcggtgtctgagcatcaaagagttaggtatttactgtagttttcactgtctgggcttattagtacctgtcctttttgggaatgcttttcagatatttgaaaggacttgggtgttaatctaagctgtatctactttaggggcaagctcctcaagcccagtaatgctgtggttcttgcagactcatagaggtactgccttgatggtcttggataagatctgggagaattctctggattaccatgcagagactcttgttctcttttcttactttctcccaaacaaacattctctctctctctgtcctgagtttctcctaaacaaacagtctctctctgtcaccactccctggctactgcctatgttcactcaggctctggagctgtaccatcagcaggtggcaaagccagccatgcctgtgtccttccctttagggtggggaggtccctcagaccccagggttggaggttcagaggtgccatccaggagtcagggaccttagaattctacctgttgttctgtcatactgcccctgagctggcagttgaaccacaagacacagttcttcccactgttctctccactttccaaaggcagaggaacctcaccccataactaccacccacccaggctacgaggagtactgccagactaccataatattcctttaaggtccaagggctctgaagtcagcttgtgatgaatgcttcctggcctgggactcaggcttcagggcagtgggctccccatttggccagggcaggtttagaagtgctgtccaagagtcaagttctggaatcagggactataagagcccacttagtgctctacttccctgtggacatgctagaacctaaggtgcaagacaaagtcccctttacttttttctctgtttttctcaagcagaaggagttttttcccatagccactacagctagtaatgtgctgagtttcatcggaagccagcaagtctcaggggctcacccaaggcccttgatgtagtacctgggtatcactgctggttatttcatgtccaaggctcttcagatagcaggtgatgaacgctgctgggattgggttttttccttcaaggcagtgggttcccttttggctcaggttgtatctagaaatgtctaggagctatggcctggaatggggacctcatgattctgatggtgccctatcttgctttggcagagctggtatccaagatgtaagacaaagtcttccctactcttcctctcctctcctccagtggaaggaagggtgtcttttggagctgtgagctatgcagactggggttaggggaggggtgatactagcacacccctggctgccccagctgatgtctcagtatgtcatgtttccccccagtccactgtctctgggcctagttcatcactatgacttgcctaagagttgcagtccttatggtctagactgcctttcacatttacttgtacatagcactgtagcccttggtggcaaggtctgcaggaactcaaatttgtaccgctggggtcagggatttccctttggccagggctggtttaaatgctccctccatgggcgggcatcagcaggagttgggtcaggttttgctatctcctctaacaggacagcactaagttcagtgccccacagttgctgtgttctccctccccctgtgcccagtgatgcttaccccaccatgtcactgatgccaggggttatagaggggtggtattggcagttcaggactgtttttttttttttctatctcttcagtgcctctttcagcaataagaagttaaaaccaggactatgagtgttcgcttgatttttggttcttacaaaggttttctttttctgtgtagatagttgttaaattgatgttcttgcacaggggacaattggtgaagctttctattccctatcttcctccacctacctctccccttgtctctttttacacttttgaacttaaagtctgtgttgtctgatataaaaatagctactcctgctctgctttggtttttatttgcatgggataacttttctcttcactacatttttaggtaaagtgagtctcaggtgagtttcaggtaaacttttctccttactggtaaagtgagtctcttgtagggagctataattggggcgttgtgtttttgttttgttttgttttgtttttcttccattcagccactctatgtcttttgattgaaatactcaatccatttatattcgagatatttatctttagataaagactttttactgccatttggtgattgttttctttctttctttctttctttctttctttctttctttctttctttctttctttttctttcttttttgtagactttttgttcctgtcttactctcttttaatcttcctttgtgattaataatattttataatggcatactttatttccttactttttatcttttatgtatttgctatacttttgcattgtgattaccatgaggcttatgaaaaacatcttataaaggctgttttaacctgccaacagcttaactaactgcattaaaaaaaactttacacttcatctccttctcccatatttacaatttttgatactacagtttatatctttttaacctgtgtattcttttaaaaattattatacctattattgtttttaatagttttgtcttttaaccttcatactgaagatgtaagtgatttacatactgccattacagtattgcatattttgtatattttacatatttgcatatttgtacttacttttttcagtaacttttatactttcagatcagtatgttttatactttcaaatgtttttcttactaattaacattcttttctttcaggttgaagaactctttagcatttcttgtaagacagatctggtgacatgatattctttgatttttttccatcagttttataattttcctcatagatcatgtacatattttattggattaattttaagtacttcttgttattaatatgaatgatactgagttttaaatttaaaatttcaatggcttatttgtggtatgtagaaaagcagttgacgtcttgtatattgactttgtatacaggtaaccttactattcttggttattaattctaagaagcttttgtttgttttatcaaatctttggaaatttctgcatatgtcattatgtcacctgaaaataaagacagttttatttcttccttctcaatctgcatagctttcattttattttctaagtgtcttattgcatttactaggactttctgtacaatgctcaataggaatggtgagaagggacattcttgttctcttcctgatcttagcaaaaaagcatctagtttcttactattaacatgaagatgttagttgtaggtctttgtaggtgttctttatcaaggtgaggaagttcttttctattcttagtctgctgggagtttttatcatgaataagtattggattttgttaattgcttttattgatacgatcttaggatttttcttctttagctgttgatgtgatagagtaattaattgatttttgaatgttcctctgcggttatttagttagcactctttactttctcgtgccttgccattttgcttcatctattccctaataaaaatcttcgatcactatgtttttgcatctttaatatatgaaccaccagttgaagtccctgccttcagcttgctcactcttcaaaaacaggacatttgactgatttttgtctaaaaattttgatgtgggttttgatacagaaccattgaaaataaacggtatgaaggcataaattatatacaacagaatgaacgtattttgagtggtagttcaccaggtttgaaaagtgttatacatccacataatcaccaccagaattatgatatgaaacattttcatcaccccagaaactttctcttatgccctttataactcatcgtttcccctcacttgtggttcctggcaaccagtgatctattttctgtcattatagttttaccttttcttcagtttcatatacatggaatcacttagtacatagtcttttgtatctggcttctttacgtagcataatgccttttagatttatgtacatcatgttagcagttggttcttttttattgctgagtagcaatctgttgtatagatatgctgcagtttagtcatgagttaatggatgtttgggttatttctagctactggctatcgtgaattgttgcgggaagtcagggaccctgaatggagggaccagctgaagccatggcagaagaacataaattgtgaagatttcatggacatacattagttccccaaattaatacttttataatttcttatgcctgtctttactgcagtctctgaacataaattgtgaagatttcatggacatttatcacttccccagtcaatactcttgggatttcctatgcctgtctttaatctcttaatcccatcatcttcgtaagctgagggtgtatgtcgcctcaggaccctgtgatgattgtgttaactgcacaaactgttcgtaaagcatgtgtgtttaaacaatatgaaatctgggcgccttgaaacaagaacagggtaacagtgatgttcagggaacaagggagataaccattaggtctgactgcctgggagtcgggtggaacagagccatgtttctcttcttacaaaagtgaataggagaaatattgctgaactctttttctcagcaaggaacagccctgtgaaagagaatgcgttcctagggggaggtctctaaaatggctgctctaggaatgtctgaattatatggttgttgataagggataaaataagccccagtctcctgtagcactcccaggcctattaggatgaggaaattcctgcctagtaaattttagtcagactgattgtctgccttcaaactctgtctcctgataagatgttatcaatgacaatgtgtgcccagtggggcatgaaacttcattagcaattttaatttcgccctggtcctgtgatctcgctctgcccccatttggcttgtgatattttgttccccttgaagcatgtgatctctgtacccacaccctattcgtacactccctcccctttgaaaattgctaataaaaacttgctggttttgtggcttggggggcatcatggaaactgccgacatgtgatgtctgccccggactcccagcttttaaatatctctcttttgtactctttccctttatttctcagaccggccaacacgtagggaaatagaaaagaacctacattgaaatattgggggtggttcctctgataatgaataatgaatttgattacaatttttttggcaaatatatgctcccatttcacttggaaaaatacctacgaataggttcgctgggttgaaattaccaagctacttttccatccctaccagcaatagatgaatcagttgctctatacccttgttagcatttggccttactagtttaaaaaaatttagctattctagtgtgtgtgtgttgtggtatattgcagtattaatttgcatttccctaatgactaatgtttttgtgtatcttttcatgtgattatttaccatttgtatatcttcttggtcaagtgtctatttgaatatgttgctcatttgtaaattctgttacttgtcttactgatttattagagttctttatatatattagacaatttttttatcagatgtgttttgcacatatttctttcattctgtaatttgttttcattttctgaaaaatgtcttttgaagagtaaaagtttaattttatgaagtctaatttggcaattcttttcctttatgatttatatcttttgtgtcgtaataaatccttgcctaactcaatgtcacaaagatttttttcctttgctcctttagatgttttatagtttagattttacatataggtctgttatctatttgtttttatctataattgcaggtagaggttaaagttcctgttttttggcttaaaaaacagaaaacatttattttatggtttctgcaggttaggaattaaggagtggcttgtctgggcagttctggctaagactttctcatgaagaatcagatactgtctgggcatgtagtcacctgaacacttgactgggtggggcaagaatctccaaaagcgctcactcatatagcagtcaaaatgatgctgttgttggaaagtaacatcagtttctcttcacataagtttctttagagaggctgcttggttgtccttatgatataatgtctagcttttgccagagagagcaacccaagagaccaaggtgaaagtttcagtgccttatatttcctagccttagagtcatacagtattacttacacagtattctgtaagtcacagagttaagcccttatttacattgtgtgattctactgtattctatagaagacttccaagaacagtgatggggtcatctctatctcagctgacatgaatggataaagagaagagatcacatgcaggagattttgggggcagatctagaagctgtgcacattattttctgctaagcaagaaccacaggggcagttggggaatgtaattgagctgtgtgctcaaggagaagaataaataggtgtgagaagcatctaacagaaagttacttgaaaacaagatttcaggtaatgtcatccaaaaatgccattttttttagaaatgaaaaatacgtgtaactagaactgagagagaataaaattggtaaaatgacaggtgctactccataagaatatattatacacttcagtgtcacatcatttggccttttgctctaatttagtgaaaaacagttttcacgtctgtcctactatgtttgaagaaagataactgatttggtttaagaatctgttttgtggcatatatattagatatttagtatacgtagatttatattttactcattttagccctgagaaataactattatcatctgtatattatatataaggaagaagattcaaaaaaatttaagtaaatcatttgagatcatagggataataaacaaaattcaaatctatgtaaatctcacctgaaagcccatgatttttcatgataaacaaaataaagatactctcctttaaatcactgaatctatataactacactcttaattgcttaaaagatagtatttttaatgttccctttccagatgagacattctagatcttatatattcttaatattctggatctgtctgaaattgcagacttctgatagaaagatataattgaatataatatgaaaatagaacatgaaactgtatcttccactattgtttagggagctttcatcatatttggaagcatttttgcaaagtggtttcaagcatgcaaataaactagtatgttatcaatgaactctaggtatagattattttaaattatgtcatccagtagccacatatacttctttaaaggatcagttgtagaaaaatctacaactggaaaccaaaatattctcttcaaaatgtcttttagacaacaaatacacctttagtttattcaccatgcattttttatgataaattactcaatgttattaaaggcttgaaaaggtattttatgatccagtgataattactttagtggtgaagaaatctgaaagttgtgtggatatgctctataatggaagagtcatttacttatgaaaaacaacattactagtaaactgataaactaagaagtaaatggcaagccaaatgaccccacagttttggcgtgttattaacctgcaaattatccagaaacatcaactgctaggatcttaaaatcatgtaggcgaatcattggaaagtcatttttttttagtcttagtaaagagctaaattagatcaatattcattttttctcatggccattttgacagttgtcttgaaacagttatactgaaatgactacctcaaaatgtaagaaatgaggggtgcagaagagatagattagagatattctggagataaaattagtgaggcttataaatgaattggatactatagatggcagaagaaagagaggagaaagactcaaaggttataatgcaatttttggtttaggtaactggatgatcttgatgccagcaaatgagataggaaacacaggggggaggaagtgtgggtttggaggtgggaggaaaatgtattcagttttaaatattgatgagtttgagttcactgtggaacactgaaatggaactatttttcagttattagaaatagtcttaaactgtgagaaaaactttacaactggagataaagtcttcagagtcatcagtatgaagcaatgagaatggctgaaattatctttgaggaaaatgtgggagaggtgggttaaaagtagatgttaggacatcactaacatttaaggggtaggtccaggaagagaaagccctagctaaaggatctgcagaaaaatgatgacaatatgagagccaagacagggatagaataagggatggagattgtcaaagaagaagtgatattcggtgttgtcaaataaacaaggaggtttaataagataaagaccaaaatctgttcttacaagttcattagtttggggggattatggaacctctacaagggtgattttaataaaactgggaaagaaacctcattgtagtgcattgaggattgactaaagataaggaaggagagaacagtgtttaagtaactcttttaagaaatataagaagaggaaagagattagattgagaatactgaattatttctggccaagagaggacaattttagggtgtaaaagacttgagcttctatgtggttagaaaggaagaactaaaaatagagagaagttcacccatcctgcacttaaccatacagtttcctgacatgcttctgtgtcttagcaaatgctatttactctgcttagagttttttcaacaaaggcatgttaatagtgggggaaagaaagtaattttagcatcgtggcagtttctcagacatctttcaaaatattttctatgacctttttagtaggttactttggcaaattatatttaaaatgcaatgtggttggaacaagatggcagagtttctttcttcactgatagtacccccacaaaaacatcattttgcacaactatccacatatgaaagtaccttcataaaagctaagggaacctgaacatgcaaccaaggctgtaaagcccccatgaactgcaaagatgaataaactgtagttggaagataagattattggttctctgtgactaagatgcctctttctacaagccattacagtaccacacgtggaagtttctcctggactcatggtttctatattggaaaaaatgagttggagctgcacatttggcttccccacaatcctgggtcccttcacaggaggctcacttctgcactggcccattgggagcaacacaagtcctgatggggcccaaccatctgaggccagctaggaacaaacagaagatgtgggactagcagcagccggtgtgtggaacttggaagtggctcatgatacctgccataggagctgcactaaaggggccgtttatgggcatcatgctgcaagaagcacattccacagatcctctggacttgagggcctgactggctctcccacatggcctaggggcccttcagggaccttccgtgggtctatcctttgcatcagtgacagagccattgtgagactcgtgtctaacctgggcttagggtgccttctagcactgaaatagaatacagcagtcagctcagattcctaaacaagcccactaaaatagactgatcacaaacaaacctagactacaaagactagaataaatatctaatttgttaatgagtagacagagatgcatgtccacaaataataggaatatactaggaaaaatggcctcaccaaaaggacaaagcaaggtcctaacaactgatcctaaaccatgtagatgaatgatctggtggacaaagaattcaaaatagttctttgagtaaaactcagtgaacttctagaaaacagaaacaattcagaaatttatcagagaaatccaacagagaaattgggaatcatataaaaaatcaaatagaaatcctggagttgaaggatataataaacaaaatgaaaaatgcaatagagggcatcaccagcagaattcatcaagcagacgaaaaatcagctcgaagacaggctcttcaaaactatatagttggaggagaaaaatgaaaagtggaattagaaggtatgaagaaaactgttaggatttatggggcaccatcagaagagcaaatctgtgtatcattgatgttcgagagggactggagtaggggaaggggatagaaagctttttcaaagaagcaataaaagaaaatttttgaaaactggagaaatatacaaatatccaggtataacaagactagatttaccaatcaggtttaacccaaataaaacaactataagatatattagaaacaaactgccaaagacaaagagtggatattgaaagcagaaagagaaaagcaaataacaaataagggaatttccatactcctggaagcaggcttctcagcagaaacctgacagatgagaatgagtagaatgatatattcaaagtgctgaagggaaacaatcaaacaaacgagaaacctgtcaaccaagaatactgtacacagtaaagctattttttttaaatgaaggaaatctgaaggcattctcaaacaaaagctgagggaattccctgtaaccagatctgccttgcaaaaaaaggtgaagagagtttgtcatactgagagaaaaggatgctactgggtaacatgaaaaaaatctgaagatataaaacccacaggaaaaagtaagtgtccaggcaaattcaacatactctaatgcagtgattgtgggacataaaccacttatggtttaaccttcgttgttaggaagggttaaaagacaaaacaaaaataatagcaactacaataatttgctaaggtataaaaagatgtaaattatgtatataataaggtataataatataataaggtataaaaagatgtatataaaaagatgtaaattatgatatcaaaatatgaaatatgggagagcaatggagttagtgttttttttgaacaaaattgtcagcttaaaataatataactgtaagatgttttttgtaagtctcatggtaactacaaagcaaaacctttaataaatacaatacaaataaaaagtaagaaatcaaaacatactgatagagaaaacctcctacctggaaaggaagacagtaagaagagaggaacaaaggttctgcaaaacaagcagagaacaagttgataatatggcagcatcaagtctttacctattaataattaacttgagtgtaaattgattaaattcttctttgaaaagacgcagagtggctaatggatagaaaaataagacctaactatatgctgcccccaagagactcacttcacccttaagaacatgtgtagactgaaaatgatggatgggaaaaggtattccacgcaaatataaactaaaagaaagcagaaattcctatatttctatctgataaatggaatacaagtaaaaaattagaaaaagaggcaaacagggccattatgtaatgttaaaggggacagtagagcaaaaggatataacagttgtaaatatatatatatatatatatatacacacacatatatatatatatatatatatatatatatatatatatacccaacatcagagcacttaaatatataaagcaaacattaatagagctaatggaatatattggaatacagtaatagtagggaatttcacctcactttcaacaatggacagatcatccagacagaaaattaacatagaaaaactgaatttaaactgtactctatacccaatggacctaacagacatttatagaacattctgtccaacagcttcagaattcacattcttctcaactgcatatgaaacattctccagaatagatcatatcttaggctacaaaataaggcttaacaaattcaaaaaaagtgaaattatatcaagcgttttttctgactgtaatagaagttgaaatcaacaacaggaggaagtttagaaactgtacagatgcatagaaattaaacaatatactcctgaacaaccaatgagccaatgaagaaattaaaagggaatttaaaaaatttcttggccgggcacgttgtctcatgcctgtaatcctagcactttgggaggccaaggcaggtgaatcatttgaggtcaggagttcaagatcagtctggccaacacagtgaaatcccgtctctactaaaagtataaaaattagctgggtgtagtggcaagcacctgtagtcccagctacttgggaggctgaggcaggagaatcacttgaactgaggaggcggaagttgcagtgagccgagatcatgccactgcactccagcctgggcgacagagcaagactccatctctaaataaatatataaataaaagtttcttaagacaaatgataatggaaatgcagtataccaaaatagcaaaagcagtccttagagggaagtatacagtaataaatgccatcattaaaaaagaagaaagatctcaaataaacaacctaactgtctacctcaaggaactaggaaaactaacacgtctcaaggaactaggaaaacaaaattgagggaaggaaagaaataataaggatcagagcaaatataaatgaaataaagacttaaaaatacaaaaaaaaaaacccaggaaacaaaagtttatttttgaaaagataaaattgacaaacctttatgcagactaagaaaataaaagagactaaataaaattagaaatgaaaaaggaatcattacaactgataccctagaaatgcagtggatcataagaaactgctatgaacaattatatgccaacaagttggataacctaggagaaatggataaatttttgaacgcatacaacctaccaagcttgagtcaagaagaaatagaaaatctgaacagactgatgttgagtagcaagattgaagcagtaataaagcctcccatcaaagaaaattcaaggacctgatggtttcactgctgaattctagaaaacatttgaagaactaatacaaattattcacaaaatattctaagaaactgaaaatgaaggaactctttcaaacccattttatgagaccagcattgtcttgatttgaaaaccaatcaaagacacaacaaaagagaaaactacagactggttttcctgatgagtatagttgtaaaaaaaataaaatactagcaataaagattcaaaagcccattaaaaaggtaattcaccattatctagaaggattcaacccaggaatgtaaagatggtttaacataagcaaatcagtaaatgtgatacatcacattaacagattgaaggataaaactatgtggtcatttcaattgatacagagagagcatgtgacagacttcatctttttgtgataaagcttccagcaaattatgttcagaaggagtatacctcaacataaacaaggctagatatgataaaaccacagctaacatcatattaaacaaggaaaatttcataataataatttttttttaaaaaaagactgatttgaataataataaagctttggtctcctgcaaaaaaaaaaaaattgaaaactttttctctgatttctggaacaagatgtggatgcttacttttaccactgctattcaatatagtcctggaaattctagccagagcagttaagcaagagaaagaaataaaaggcacccaaattaacaaggacgaaatcaagttgtccctgtttgcagacaatatgattatctatacagaaaaccctaaagactccaccaaaaactcttagaactaataaacaaattcagtaaagttgcagaatacaaaaagcaaaatgcaaaaatcagtagcatttctatacaccaataggaaactatttgaaaaatcaagaaagaaatcctatttataagtcagatgcagtggctcatgcctgtaattccaacactttcggaggctgaggcaggaggatctcttgaaggcaagagtttgagactaggctgggcaacattgggagacgttgtctctaccaaaataaaaataaaaaaattaatagggcacagtggcacccacctgtagtcccagctactcaggagactgagggaggaggattgcttgggcccaggagtttggcactggagtgaattgttattgtgccactgcactccaccctgaatgacagagtgagactctgtctttaaacaaacaaacaaacaaacaaaacacctacctaggaatatacttaaggaagtgaaagatctcttcattgaaaattataaaacattggtgaaagaaattgaagacaatataaatgaattgaaagatatatcatgttcatggatggtaagaattaatatttttaaaatgtctatactacccaaagcaatctacagattcagtgcaatttctatcaaaattccaatgacattcttcacagaaatagaaaaaaaaatttaaattcatatggagccacaaaagaccctaaataggccaagcaatcttgagcaaaaagaacaaagctggagacatcatgctacctgattcaaaatctactacaaaggtatattagccaaaacagtatggcattggcataaaaaatagacgcatagacctatggaacaaaatagagagtcccgaaataaattcaggcatttacagccaactgatgtttatgaaaggtgccaagaacacacaatggggaaagaacagttttttcagtaaatggaactgggaaaactggatagctacatgtaaaagaatgaaactaggcccctctctctctctgtatgtaagtcaattcaaaaggattaaatacttaaatgtgagacttgaaactatgaaattgctagaagaaaacacaggagaaacactgtaagtgattggtctggacaaagatttattttagacaagacctcaaaaataagagcaacaaaagcaaacataaatggatctacatcacactaaaaagctcctgcacagcaaggaaaaaatcaacaatgaagagacagcctatgacattagaaaatatttgcacattatgcattcaatagcaaaaaaccccaaatagtctgatttaaaaatgggcaaaagatctgaatagatatttctccaaagatgacatacaaatagtcaacaggtttatgataaaacgctcaacatcactatcagggaaatgcaaatcaaaaccataatgaggtattgccttactgtggttaaaatgtctattatcaaaaacacacaaaaaatgttagtgaggatgtggagaaagaagaactctcttttttttctttttattttattattgttatactttaagttttagggtacacgtgcacaacgtgcaggtttgttacatatgtatacatgtgccatgttggtgtgctgtacccattaactggtcatttagcattaggtatatctcctaatgctatccctccccctccccccaccccacaaccgtccctggtgtgtgatgttccccttcctgtgtccatgtgttctcattgttcagtttccacctatgagtgagaacatgcggtgtttggttttttgtccttgctatagtttgctgagaatgatggagtctcgctctgtctcccaggctggagtgcagtggtgccaaaaactcaaatttcatggattgactttgttcttagtagaaaatctgtttgagaggaaatttgtgaagtagcaagagaaaaaggaaagcatggtaaagttagtatttcattatataggtgtgacagctggcacccagttttctcatttggttatttaagtgagcctaaacaagttgtcagtattcaaggctataattgtacagttgggtattttggcaagtcccaaatgtgtaattcaggctgtcataagtggacaatctaataaagtacatcttaagatcataagaatgttttttatattgcttataagttagttgaggaaggattggtcttcagtgttgtttatactctttgaaggcaattttatctaaatttttatttatttatttatttatttatttattttttgagacggagtctcactgtgttgccaaggctggagtgcagcagcatgatcttggctgactgcaacctctacgtctgggttcaagcgattcccctgcctcagcctcccgagtagctgtgattacagatgtgcaccaccacgcctggctaatttttgtatttttagtagagatggggttttcccattttggccaggctggtctcgtactcttgacctcaagtgattcaccctcctcggccttccaaagtgttgggattacaggcatgagccaccgcgcccggctgagaaacaggaactcttatatgctattggtgagaaggtaagttagtacagctgttgtggaaaacagtgtggaggttccccagaaaattataaaagttaaaaaaaaactgatccggcagtctcactactggagtatttatccaaaggaaatgaaatcagtatgtcaaagagacagctggacttccatgtttatttataatagccaagatatggagtccacctaaatgtccatcagtggatgaatggataaagaaaatgtattatacatacacaataaaatactattcagtcataaaaaggatgaaatcctgttatttgggacaatatggatgagcctggagggcattatgcaaagtgtaataagccaggcagagagacacaaatactgcatgatctcactcatgtgtggaatccaaaaaattgatctcctagaagttgtgagtacaatagtggttaccagaggttggggagaatgaggagagggtagatggggagaggctggtcagtgggtacagtgttacagttaggtaagaggaataaattctgctactccgttttacagtggggtgactgtagctaactgtaacgcatcggatatttcacatagctagaacagaggattttgaatgctttcccaacaaagaaatgataaatgtttaaggtgatcatatgctaattaccgtaatatgatcattacacaatgtatacatacattaaaacatcacattgtactccataaatatgtataattattacatgtcaacaaaaataagtaaaataaaaatgcgtttaatgcagagtggctgagtgaagagctcagcaagtccacttattccaaagtgacgattaaagtggattaaactgtcaaaaacagccatttcaggactttggaaagcgactaaaattatacaacagattgagaagcaattattcacgaaaaactactgaaccttatgtctatcatattttagcccctgaggctgctcccactacgcccattttcaccactgacttactatcatggtagtttttattagggtagggcaacctgtggaaaccagtagctttgctgttgatgctagggaaggctcacttgatctggagcagagcgtggaacaaccctatgtttccacagtattgttagaaacagtagtgatttttgtagcaaaggagtgggaagctcagtcttgcaagtagcatgagattataatcctggttggggaaagctacagattggccaggattttaacatggagatctgaggaattagtggagatcctacaattatcactggtcatctggaaggctctctattatgtgcaaggctctgcacacactcaggagaaaccagagagggcctgcctaactggtcatatgtccatgttgagaccttgcacatgtacaatgcagacatgtttccagaattctgtccctaaatactttcgcttctttcttttctgttgtatgaagggaatctgtgctccaggaaatgacggatacccgattctcccacaaaatctacagtcttttcttgtcagtaagtggcggcttttaggctccaagtataggaatttataatccaacctctgtctgaccctatgttttctgtactggattattgtgatacctcaaactggtcttcctgccttccagccttgtcccctcccctggagtctgtgttccacacaccagccatattcatccttttgaaatgtgtcagatgacattattcctcttctgaaaatcctttggtggcttctcattttacttagccaaagttctgtttaccatgattcacaaaaccatacataatcttgctgtctgagttttacttttctgacctaatgttctaccactctcagcctcataaattatacacttgtccttttgctgttcttccaacaaacaaaccagatgaactgctgcctctgggctattgcacttgctcttccctctctacctggagctctttttttccaccaaataggcacatggttctttctctcccctttttccagtctttctgtgaatgctatcttcttagtgaaatcttgccagctcagtaaatagtatgaataataataaatgaatgaatgaatagcaataaagggatagtaatgtcaatgaatgtttttcttttaaaataccttaaaattattcaataatgagaaagactagaaaagcagagataacatttctggaattgcactttaaaacatcaaaaacataaaatacaattttcaattaattattcttatatatggtccaaacaggagcaagtcactgaatttttgtttttctcttaaaattttttcacttctattcttaacagtttttcactatttgatatgtcaccttgtcttttgaaatatgtattagccatcacctatataaaaaaaagctacgaaaattacagagtaggaagtaatagtttcttttcttttatagatcaggtgtttcatacattttcaatacactttattattagttctgtaattgacattttgtcaacgcaaacatcaaaagttagagctggaggtggcataaaaatgctttcctgctgtggggaattagagtattcttttatttaattattttcaacaatttgcctgtcaaagcaaaagtggaagttcaagtcattctaaattgtcttgccttagcctgtaatttaactaaaaagggatacagatttaaagttgcttttaattttctgggagagatctaaagtaaaatgaattaaggtatctttgcctatctttcaaatgctgttcaaaaaatgaagtgtgttaaagggcattaatttgaataccaataatcttagcagaaagttaagtccaccaatactgttttatgaggattattttaaaattaatttgtcacctgtatatactcccacatgttctggattgcctctgttgaagttagagagctacttggttttgcttcatctgaattttaaactggctttctgtttgttggtctcatacttgcatttatacttgtaacatggatagtaaactgcaggaagaaactatttgaagagaacaaatgtctaatacattgtgctatcctaaaggctcagttctgggttagtgtgccctggaagagggcatatttgtgtattaatttgattcatgtaacaaatatttgtgtacctgctgtatttttagcactatgcttgattctgagagatgacaaaataattctatttctgttgcttaaaagacatatgcccaagtaattttaagtgtccaggttcatggtaacattaggtaagcttaacactttgttgtaccttttaggtttagtaaaatctgcattttttgttgttgtttttgtgtttgtattggctaaaatgctatcttaaaaaaattttccccctgagttgtcatagcttttactatagaaacaagtttgcaaatgaagattcttttttgagacagggtcttactcttttgcctaggctggaatgcagtggtgtgatcatggctcactgtagccttgaactcctgggttcaagtgaacctctcattgaacctcctgcttcagcctcctgagtagttaggaccacaggcatgtgccactaccccaggctaatttttaaattttttgtatagttgagatcttcttgtgttgcccaagctggtctggaactcctgggctcaagtggtcctcctgccttggctttccaatgtgctgggattgcaggtgtgagccaccatccctggctgaaaattgtttatacttggatgaaaaggaactagaggatatagaaaagaaatgaacttttaaagaaaagataatcatatagtgcttatgtgtggcaggcactggttaaggaaatgctttttaaactttaaatgtgcacatgcattacctggagatcttgttaaaacgaagctttattttataggtcaggggtagggcctggtctgctttcctaaaaaatgtctggataccactgctcctggttacaccatggtttgagaaacaagagtttaaattgcctacctatattagctcatttaatcctcttatcaactctatatggtaggtacaattattatatccattttacaaatgaagaaatatgtttccatgcaataatcttggcatgatagatgctgtttctttaccagataatttcagtgtttataaatgtgtgtgtgtgtgtgtgtgtgtgtgtgtgtgagagagagagagaaagagagagaaagaatggaggaggaaggactttaaagtattgttgtattattgcatttttacattatgtattctgacaaattaaaatgattaaaaatatatctgataaggaagaatatttgagaaaaagtggagggagagagtgtatttgtatttgttttctattgctgcataacagattaccaaaaaaaatttagcatcttaaatcatcacacatttactagatcacagtttccatgggtcagaagtctggacatgtcttagttgagtcctctgttcagagttcagatgactgtaatcagttttgtttagggctgtagtctctttgaggcttggggtgctcttcaaagctcacatgattttggcagaattcatttcgttgcggctttagaacccacggtagcttgcatattcaaggtcagcagaaaatctcagggaagagtagaaagtagaaaggataacattttgacatttgtgaaaacaagaattacatgtgcaagcagaatatgaagtatggttatgaggcagtgtttgaggttggagaggcagactgaaagcaggccatgaagagcctccacagaaacatagaacattatggactttaattgtataaagcagtggaaaatcactggagggatttgagctaggacatagcatgagcaaagattttcgtgaggaagattaagctggaagtaagctttgtaaaatgttaacagagaagaacctgtgatatgtaagtctcatttgaggggataaaagcctgaactagggtactggccctagaaatagaaaatgactgattttaagaaaattattgacatgaaaaggtgtctgagtcagacctctctttaattgccatattcaaggactgagttctgggttagcttgccctggaagaggctatatttgtgtattaattaattttattaatttaaaaaatatttgtgtacctgctatatttttagcattatgtttgattctgagatgacaaaaagttcctttaagattgcttatattttaaataggaataaacagtttaaatcattacagaagttaaggaatactgtgaaacattgcagtttgagttgcgtttgactcaaatatagtacatgccaaatgtgtggcttagatcctaagtgctgtgggactaattaagggtattatttgggctcttgacctttttctctacagataaccagtggtatttcaaaaaacaatttaaccatgcttgagtatgatagggtctcatatcaactagactcaagcatttaatgtgaattttctcccctgtgatttgtatttgatttaaagctctgaaatacaaaatagcaatgttaaatttatgattatagtctgttaaggtttaatcttattctagcctcaatcatatgtaatcattatgtattttaaaaatacaacaacagtttcttaagagtggcaattgacagcattcaacgaaagtatcttaaattttcaggtgtctgggttgtatatcttttaccagtaaaaatcctcatgcagttttaaggagtaattgacctttgacaaagaatatattttaatcacctcctgtagcaatgtttttgtcactggagagtttattatcctgtttttaactggtggaaaatttactgaaatgtagtgttttttttttttaagtggtactattcttgaatttggtggattgaaatttgattttaacctatttagtgtatgtgggaatgatttctattatattaaattgtaaggtatatagtctggtattttattatgattaataatatttatttattgctataaatatactctcatttttaatgaaattgttcctttggaaaagtgtaatattgtacacttaaaaattctttcatatttaacatttttgaagcaaataaaatatgaattggtactctgaaaggagcctcaggttgtcaaattaggactcctgagctaagaatgggttttgcacttttaaaaggttgtaataaaaaaagaagaaaagtgtgttacagagctgaaaatatttactatttggttctttacaggaaagctggctgaccccagtagtcacagcatatttgtgaatagatttaagtatgttttatgtaattcctgaaagtctgtgaaatgtactgtatgactatacttttcttgtgtacatatcatgttactttggtacattttattatataatagattttctttggattagtgcttcaaaataaacagttcttatacaactttttacatggatagtatttataatgaagttttagcgtatttctagtagaaaatatctttaaaaaattaaagtttttttttgcattttgaaacatgcagcgcaaaaactcaaatttcatagattgactttgttcttaacagaaaatctctatgaaaggaaatttgtgaagtagcaagagaaaaagaaaagcatggtgaagctagtatttcattatacaggtgtgatggcaggcacccagttttctcatttggtcatttaagtgagcctaaacaagttgtcagtattcagggctataactgtacagttgggtattatggcaagtcccgaatgtctaattcaggctatcataagtggacagtctaataaagtacatcttaaaatcataagaatatttttttatattgcttataagttagttgaggaaggattagtcttcagtgttgttaatactgtttgaaggcaattttatctaattttttttttttgagacggagtctcactctattgcccaggctggagtgcagtggcgtgatctcagctcactgcaacctctgcttcccaggttcaattgattctcctgcctcagcctcccgagtagttgggattacagacgtgcaccaccatgcctggctaatttttgtatttttagtagagatggggttttgctatgttggctatgctgatctcgtactcctgacctcaagtgatccacccacctcagcctcccaaagtgctggaattacaggtgtgagccaccgcacccttgaatgtaaaaatattttatgaagcttaagtttcaactttatagtaaatatgagttgtgactatgactttttgtattgtatgcttttagaaaagagttaataagttttatttttaaatacttctatttggttattaaattttttaggtttagtttttcttggtgacctcttttttcttttggtgtttgcacactaatgtcaaatttagttcacttagtactttgtagatatactatttacatgatatgaaacattattaatgtaaagagacattgccaagaattaagtgaacatgtttctctttatttctttctaatttgtttaaaactcttcctttgagaagttaagaaattagttctgaattagccagtaccccatggaatgttatccttagttcttccttttctttttttcttcaacttttaagttctggggtacatgtgcacatgatttgctgaaaagatcagtctgtcacctggatatgaagcccagcatccattagctattcttcctgatactcccccttccccactccccagacaggccccagtgtgtgtttttccctgccatgtgtccatgtattctcatcgttcagcttccacttatgagaatatgcagtgtttgcttttctgttcctgcattactttgctgaggataatggcttccagctccatccatgttcctacaaaggacatgatcttgttcctttttatggctgcatagtattccatgatgtatatataccacattttatttatttagtctatcttgatgggcatttgggttgattccatgtctttgctaattgtgaatagtggtacaatgaacatacagtgcatgtatctttataatagaatgatttatattcttttgggtatatacccagtaatgggattgctgagtcacatggtatttcttcttctagatctttcgggaattgccacattgtcttccacaatggttgaaataatttctcaacagtgtaaaagcgtctcttttccttcacgaccttgccagcatctgttgtttcttgacttttaaataatcaccattctgagtgacgtgagatgatatctcattgtggttttgatttgcatttctctaatgatcagtgatgttgattttttttttcatgttagttggctgcatgaatgtcttcttttgagaagtgtctgttcatgtcccttgccactttttagtggggttttgttcttgtaaatttctttaagttcctggtagactctggatattagattgttgtcagatggatagatagttctttcttaattcatgttattttcatgtgatgataatgtgtatacaactgtccatcatttttctaacttcagtgtgataagtgcctcacttcgcaactccccaaattctgaatgctaatatgatgcatctttgccatgcttcgtgttacaaaatgttgcttgaaagatgaagattaaaattaatttataatttatcttagagacattggcaccatgctggttgtatgatttctttatcaacacttctgtaagtgttgtagaataggatggcattggataggagagaatattagaagtaggagggaagttcagtttaacaacttggatgaaaacttgaccgcttactcatgtattttattgacattgttcagagtacatgttttgcacagatgttttatttaaaatccctgaagtttgaactgaaatggaacttttcctgtccattaaaatccttttttctacttaatgtaattcatagaataattgggaattgggtgaaaatctttgatttctaaagttttaagctattaaaaaatttcattcttatctttgtttttcaaggcaaataattatcttatgacctgaagatttgttttgcttaatgaaatgtgtttcaaaaggagagaaatcttacatatctacatgcaaagtagtcgtattctgaaaaaagttacacactgatacttatctgaaggttggaaggcttaatttaagtatctttcttgataagtacaaccagcctttaaatgatggataactgaactctgtacttgaagggtcagtggagctggctaaatgttacagtttttcatagaaatttgacttaatttttaaaatctttcaatttatgtgtaagtatattttcctaggtggttcagtaaagcgtgtgttttaaaagattgtctagatgcagcatgctaaaagagggaggtaagaatgtttattcattatggctacagtttaatatgttaatatgtttaatacatattaaacattaacattttaacattttaatcaataacattttaaatggtagcctaataaagagaggggattggtcagaaacaggatagagttcttattgttgttgactaatgataaaccaaatgcaatagaaaatccccaagtggattttctctgagataaactgataatataatagcattttctatttttccctagtaagtattgttgatggttgtcagttcgtttttcccaagcacatgaattagctaacgtgattctctgtactaatcttagtttttgactgagaatatcatgtacttaaccaaatctttgagatatttaaataaattaacaaaactgtaaaaatcatctttgtaaagctagtcactgatttatgatttgggaagataagcagctttgtattacttagaaaacaaagaaaaatatgtagaatttctgttttttcttttttattgtttaaaaatttaaatcaacatcagtgtgcagatgggtagataaaataaaaatttaaatcaacagatgtaaaatggaccattcctcttccctgcccaccaattctaattctcagaagaatttttttttttttttttgagatggagtcttgcttgttgcccaggctggagtgcagtagtgccctctcggctcactgcaacttccgactcctgggttcaagtgattctccttcctcagcctcctgagtagctgggactacaggcacgtgccaccatgcccagctaatttttgtatttttagtagagacagggtttcaccatgttggccaggatggtcttgatcttttgacctcaggtgatctgcctgccttggcctcccaaagtgctgggattacaggcatgagccactgcacctagccagaaattttttttaacagtttatgtattgttttccaagaggaatattctttatatcctgcttggcaacttgtttttcacctcaaacaatgttatgaacactacattaaacgatttctccctctttaattgcacagtattctgtggtgtggatatagcataattttatttttccatttctcttttgagggtcctataatcattttccctttttatttcctgctattacaaatatacaaatagtatgtactctgaaacacaaacacatatctggaattgaaattgttgtggtatggagatctgtttttgtataggtagtaccaaatttctgtccagaaagattgcaaatatatgccctttcctattgtgtatctgagtaccctttgtctcataaatttgccaacagtagatattatgtcttttcaatttttaccactctagttcacaataaatatctcattttgtttacatttccctgattacaagtgaggcttagcaagttttaaatatttatcgggctaatacatttgattttttaggtagcctatatgctgtaaaacctcattaagaactgctctttctgtcagagatttaatttgacaatacctatagtcaaattttaaaaatctgattgggttcattagtctgcctgcatattagtctaaaagaaagtcagaaaagtaggggaagagccatgaaaaatcattccttctttcccttcaaaaggagtgggtactccttttggatttttatctgttaagcagtctatattgttttgggctctcagcacattatagatttacagatcaaaattactaggaaaaccagaaataatccatcctgtttgaggggaggggatttgtgctttcccctagaagtctcttcctttctcttagatgtttattgagtgtcttctctgccagcactgtagctgtgtagctgctggccatttaggcctgtttcatccctgactgacagcagctttacttggtgtggtggcaataaatcaaatcaaaatgtagtgccattagagtaagacatcttaatcatgtttcaactgacctaagaaatttaaatgttctggaggatgatctctagtgagagctggagaccttatagtttgtcaggaatgttaaggtatatagggtgtctaaaagcatatagtacttgaaacttattttcgtggtgatctctggagaatgctctctgtaatgataataacaacaataggagttagcttttattgagcatttacacctgcctgggattactgtcagcattttacatctgttctgcatagtgtgaggaagtactttctggcctttggactttcgttctcataagtagttgtagaaggtctgcggctacacaaagtctacttctttagggaccttgtgtctaggagtgcttgtatagccattttaccctcttttgctgcctatttagtgattaggattcagactaaaaaaatgatttagtgattaccttggtgtgatcattcacacatcatggtgatagtgatacagctgcatattttcagtgaatctttgaattagaagagatagagtcatctactgcttccctttttctgaaatagaatccctataataccttgtgagtgcactggccactgtggaaacaggctgagtgactgattcacaatggaattaattccactttctagttattaataataaggaaaatatgtatgaaacactttgtgaattatccacttaccagaagctttttaacttgatgtgatcccttttgtccatttttgccttggttgcctgtgcttctgggggtattactcaataaattgttgcccagaccaatgtcctcgagagtttccccaatgttttcttattgtagcttcataggttttggtcttagatttaaatctttaatccattttgatttgacttttgtatatggtgagaggtgcctagtttcatccctctgcatatggatattcaattttcccagcaccatttattgaagagactgtcctttcttcaatgtatgttcttggcacctttgtcaaaaaagagttcactatagacatatggatttatttctgtgtcctctcttctgttccattggtctacatgtcttttatttaatgccaaccccatgctgttttggttgctatagctctttagtataatttgaagtcaggtaatgtgattcttccagttttgttctttttgcttaggatggccatggctagtctgagtcttttgtgattccatataaattttaggattgttttttctatttctgtgaagtatgtcattggtattttaaaagggattacattaaatctgtagagtgctttgggtaatatggacattttaacaatattgattcttccagtgcgtgaacgtggaatatctttttattttttggtgtcctctttgatttctttcatcagtattttatagttttcattatagaggtctttcgcttgtttggttaagttaattcataggtatttaattattttttagattgtttgctcttgacttacagaaatgctactgattttttatgttgatttttgcattctgcattttactgaatttatcagtttgaatagtttttttggtagagtctttagtttttccaaatataagatcgtatcatctccaaagaaagataattggcttcttccttttcaatttgagtgccctttatacctttcttttgtgtaattgctctggctaggactttcagtactatgtcgaataactgtggtaaagttgggcttccttgttgtgttccactatcttagaggaaagactttcagttttcacccattcacagtgatactagctgtgggtcttttgtatatggattttattgtgttgagatatgttgcttctgtatccagtttttttttgaggggttttatcatgaagggattttgaagtttatcaaaattttttaagcatcaattgaaatgctcatatggtctttgtccttcattctgttgataatgtatcagattgattgatttgtgtatgttgaatcatacttttatctcgaggataaatcccaattggtcatgatgaatgatctttttaatgtgttgctgagtttggtttgcctagcattttgttgaggatttttgcataattgttcaacaggaatattggcctataattttcttttttaaatgtgtttttggttttggcatcaggacaatactggccttgtagaatgagtttggaagtattcctttctcctcctttttttgaaatagttccaatgggattgatattaattcttctttaaatgttgggtaaagttcagtgatgaagccatcagatcctggacttttctttgctgaagactttttaattacgactttgatctcattacttcttattggtctattcaggttttggatttcttcatggttctatcttggtaagttgtctgtgtctgggaatttatccatttattctaagttttacaatgtattgacacgtagctgctcatagaagtctctaataattcttcaaatatctgcagtattggttgtaatgtcttctttttatctctgatttcatttatttggggcttctctttttttttcttagtctgtataaagttctatcaattttgtttatcttttaaaaaataacttgtcattttgttgatcttttgcatttttttcatttatttctggtgtgatatttattatttcttttttttctcctaattttaggtttgatttgttcttgcttttctagttctttaagttgcatcgttaggttgtttgatgttttttctacttttttgatgtaggtgcttatagctataaactttccttttagtactgcatttgctgtatcccataggttttagtatgttctgttttcattttcatttgtttcaataaattttaaaatttccttcttaatttcttcattgactcactggtcattcaggaggaagttgtctaatttccatgtgtttgtatagttcccaaagttcctcttgatttttagttttatttagttgtgggcagagaagacacttgatataatttcagtttttaaaataaatttaatacttttttttggcctaactgatgacctatccttgtgaatgatccatgagctgaggagaagaatgtatattctgtagccactggatcaaatgttctacaaatgtctgttaggtctatttggactgtggtgcagattaagttccatgtttctttatttactttctgtgtggatgatctgttcattgctgaaagtggagtgttgaagtctctagctattgcattggggctgatctctttctttagttctaatatttggtttatatatctgggtgctccaatgttgggtgcatatatatttacaatcattatattctgttgctgaattgacccctttatcattacatagtgacccctctttgtgtgtgtgtgtgtgtgtgtgtgtgtgtttttttctttgagactgagtcttgctctgtcacccagactggagtgcagtggtgcgatcttggctcactgcaagctccacctgccgggttcacaccattctcctgcctctgcctcctgagtagctgggactacaggcacccgcctccacacctggctaatttttttgtattttttagtggagatgcggtttcaccgtgttagccaggatggtctcgatctcctgacctcatgatctgcccgcctcggcctcccagagtgctaggattacaggcgtgagccatacagtttttctcttgaaatctgttttgtctaattatagctcctcctgttctttgtggcttccatttgcatgggatatcttttctatccctttattttcagtctgttttgtgtttttacaggtgatgtttatttcttgtaggcaacagatcattgggtcttattttttaaatccatttagccactctatgtgtttttattggagagtttagtccatttacattctgtattattattgataaatgaggacttattcctgacattttgttatttgttttcttgttgttttgtagtattctctttcttcctatcttcctttctgtgaaggttattttttttggtggtgtgctttgagtttttgctttttattttttgtgatcttttgtatgttttttgacttgagttaccctgaagcttgtaaataatatcttataacccactattttaaactgatgacagcttaacactgattgcaacaacaaacatactattaggttggtgcaaaagtaatcgcagtttttgccattactttcaatagcaaaaactgtgattacttttgcaccaacctagtaacaaacaagcaaaaagaaaactaataaaaaatccacactttaccttcatttgccccacttctaaactttttgttgtttctatttattttttatttatttatttattttttttaatttatttttttattgataattcttgggtgtttctcacagagggggatttggcagggtcatgggacaatagtggagggaaggtcagcagataaacaagtgaacaaaggtctctggttttcctaggcagaggaccctgcggccttccgcagtgtttgtgtccctgattacttgagattagggattggtgatgactcttaacgagcatgctgccttcaagcatctgtttaacaaagcacatcttgcaccgcccttaatccatttaaccctgagtggacacagcacatgtttcagagagcacagggttgggggtaaggtcacagatcaacaggatcccaagacagaggaatttttcttagtgcagaacaaaatgaaaagtctcccatgtctacctctttctacacagacacggcaaccatccgatttcccaatcctttccccgcctttcccgcctttctattccacaaagccgccattgtcatcctggcccgttctcaatgagctgttgggcacacctcccagacggggtggtggccgggcagaggcgcccctcacctcccggacagggcggctggccgggcggggggggggctgaccccccccacctccctccaagacggggcggctggccgggcggggggctgacacccccacctcccggacggggcggctggccgggcagaggggctcctcacttcccagtaggggcggccgggcagaggcgcccctcacctcccggacggggcggctggccgggcgggggggctgacccctcccacctccctcccggacggggcggctggccgggcagaggggctcctcacttcccagtaggggcggccgggcagaggcgcccctcacctcccggatggggccactggccgggcaggggggctgaccccccccacctccctcccggacggggcggctggccgggtggggggctgacccccccacctccctcccggacgaggcggctggccgggcgtggggctgacccccccacctccctcccagacagggcggctggccgggcagaggggctcctcacttcccagtaggggcggccgggcagaggcgcccctcacctcccggacggggccactggccgggcaggggggctgaccccccccacctccctcccggatggggcggctggccgggtggggggctgacccccccacctccctcccggacgaggcggctggccgggcgtggggctgacacccccacctccctcccggacagggcggctggccgggcggggggctgacccccccacctccctcccagacggggcggctggccgggcagaggggctcctcacttcccagtaggggcggccgggcagaggcgcccctcacctcccagacggggcggctggccgggcggggcgctgacccccccacctccctcctggatggggcggctggccaggtggggggctgacccccccccacctccctcccggacggggcggctggccgggtgggggggctgacccccccatctccctcccggacggggtggctggccgggctgaggggctcctcacttcccagtaggggcggccgggcagaggcgcccctcacctcccggacggggcggctggctgggcggggggctgacccccccacctccctcccggacggcacggctggccgggtgggggggctgaccccccacctccctcccggatggggcggctggccgggcggggggctgaccccccccccacctccctcccggacggggtggctgccgggcggagacgctcctcacttcccagatggggtggctgccgggcggagaggctcctcacttctcagacggggcagctgccgggcggaggggctcctcacttctcagacggggtggttgccaggcagagggtctcctcacttctcagacggggcggccgggcagagacgctcctcacctcccagacggggtctcggccgggcagaggcgctcctcacatcccagatggggcggcggggcagaggcgctccccacatctcagacgatgggctgccgggcagagacgctcctcacttcctagatgtgatggcggctgggaagaggcgctcctcacttcctagatgggatggcggccgggcagagacgctcctcactttccagactgggcagccaggcagaggggctcctcacatcccagacgatgggcggccaggcagagacactcctcacttcccagacggggtggcggccgggcagaggctgcaatctcggcactttgggaggccaaggcaggcggctgggaggtgtaggttgtagtgagccgagatcacgccactgcactccagcctgggcaccattgagcactgagtgaacgagactccgtctgcaatcccggcacctcgggaggccgaggttggcggatcactcgcggttaggggctggagaccggcccggccaacacagcgaaaccccgtctccaccaaaaccagtcaggcgtggcggcgcgtgcctgcaatcgcaggcattcggcagactgaggcaggagaatcaggcagggaggttgcagtgagccgagatggcagcagtacagtccagcttcggctccgcatgagagggagaccgtggggggagggggagggggagggggagggggaggggttgtttctatttatatcttattatcttgtctaactcttgaaaagttgtagttatttttaacaggttcatctttctacccaaaatgtgagtagtttactagtttacaaagcacaattatagtgttatcattttctgtgtttgtgtacttactattactagtgagttttgtatcctcagataatttcttattgttcattaatgtccttttccttcagattgaagaactccctttagcatttcttgtcggacaggtctggtgttgataaaatctctctgtttttgttgatctgtgcaagactttatttctgcttcatgttggaaggctattttcactgaatatactatcctaagattttttttttcctccagcactttaaaatgtcatggcactctctcctgtcctgtaaggtttccactgagaagtctgcttgccagacatattgcagctccattgtatgttgtttctttattcctgctgcatttaggatcctttctttattcttgacctttgggtgttagattgacctctgggtgttatacaaccttgacctttgggtgttttgacctttgggtgttagacaaccttaaggttgtcttctttgagttaaatctgcttggtgttctataacctttttatacttgaatatttttatctttctctacgtttgggaagttctctgtgtgttttttttgttttgttttgttttgttttgtttgagatggagtcttgctctgtggcccaggctggagtgcagtggtgccatctcggctcactgcaagctccacctcccgggttcatgccattctcttgcctcagcctcccaggtagctgggattacaggcgccggccaccacacctggctaatttttttgcttttgtatttttagtagagacagggtttcactgtgttagccaggatggtctcaatctcctgacctcatgatccgcctgcctcggactcccaaagtgctgggattacaggcgtgagccaccacgcccggccgggaagtactctgttattatccctttgaatacacattctgcaactgatctctctctctctctgcctcctctttaaggataattactcttaaatttgcccttttgaagctattttctagaccttgtagttatggtgcattcttttttattctttttttcttttatctcttctaattgtgtgttttcaaataggctgtcttcaaggtgactaattctttcttctgcttgatcaattctggtgttgaaagactatgattcattcttcagtatgtcagttgaatttttcagctccagaatttttgcttgattttaaaaaaataatttcagtctctttgttaaatttatatgatatgattctgaattctttctctttgttatcttgaatttctttgaactttctcagagcagctatttcgaattctctatttgaaaggtcacatatctctgttacttttggattgattgctagtgcttcatttagttcatttgggagttgatgatttcctggatgatcttaattcttgtggatgtttgttgggtgtctgaacattgaagagttaggtatttattgtagtcttcaagtttggatttatttgtaccagttcttcctgggaaggctttccatgtattcaatgggaattgagtgttgtgagttaagtctttggtcactgcaggtatatctgcgttagagggcaccccaagccatgtaatgatccttgtggaattttagaggtacctctttggtggtcttcggtaagatccaggaaaattctttgtattagcaggcagagactcttgttctcttcctttactcttctccaaagagattctctctctgtgtgctgagctacctggtgtttggggaggggtgacacaaccatttctgtggccaccacctttgggactgttctttatcagacctgaagccagcatagcacaggatctcatccatggcctgtggctctattgcctggctactgctgatgtttattttaggcccaagtgctcttcattcagcaggtgatgaatcctaccaagagtggattcccttttcccttttgacctagagtgtgtcgtgaaatgttatctgagagcgagggcctggaatgggggcttcaggactctgcttggtgctttattttactattgctcagctggtatttaagttccaggacaaagtcctctttactctcccctcttatttcctcaaattggaaggagtatccaccaaagctgcaagctgtgctgcctagaattacaggaatggtgacataagcactcccttggctgccctacctagtgtctatctagatcacttgcacctcatgtctccttgctccaagcccagcatagcaccaggacttccccagggattacagtccttgtggcctagactgcttttcaagtttatttaggacccctaataaagtttcaagtttataaggacccagagtgctttagcccgtggtggtgggtctacctggaactcactgactgctgggatttcctcttgctagggctggtctaaatgctccctcctttggcatgggctgaattttgtcctgtgttactttctgctgtaatagggcagcagtgagttccaatgcaaagtttcacagtcactgtgctctgtcttccccaagtacatggattctgtctctgcaacacacaggcactatccagggatgagggagtgatggtgtaggcagttcaagaccatcttttttcctcactgcagtgcctctttctttgatagctactctttctttaccatgtctggtattcgaatttgctcagtaactcattttggttcttttcagcagtacaaatagactttaggaggggattatacaaaaatctgaatggagatatgaatgtggtctcactgttacttccttgactatctgatttcatgttgttgttttggctagtattgtgggcatttctcttttattattgctttgtattcttccttttagaattccatgcttggttgaagacagtgatctgcccagttagagatgggctctaacatctaacatctaacagatgttaacaagcttctttttcatccattagttacgtttgagctatcttgatgggttctttcttctcttccaccactttgcttcttttttttttaaattcaatttaatttttattaattttattaattaattaatttttaccttgcagctccagctcaaaggaagctttgcttctagtcacctccaacacttgcttaatttttttattctaattgattggctgccttataagaagctgttctttgaataatatgtttaaaactaattctttctgtagctatttatgtatgttctttcctatcatctgcaaagtgcttctctcctttgccacttcacaatttactttaaaaaaagagtcatagataataaattcaaatagatattcctaagttactgaatgatagccatatgctacccttatgattaagaaagcattttcctcccattttgtaggttgcctgttcactctgatggtagtttcttttgctgtgcagaagctctttagtttaattagatcccatttgtcaattttggcttttgttgccattgcttttggtgttttagacatgaagtccttgcccatgcctatgtcctgaatggtattgcctaggttttcttctagggtttttatggttttaggtctaacatgtaagtctttaatccatcttgaattaaattttgtataaggtgtaaggaagggatccagtttcaactttctacatatggctagccagttttcccagcaccatttattaaatagggactcctttcctcatttcttctttttgtcaggtttgtcaaagatcagatggttgtagataaggatgtggagaaataggaacacttttacactgttggtgggactgtaaactagttcaaccattgtggaagtcagtgtggtgattcctcagggatctagaactagaaataccatttgacccagccatcccattactgggtatatacccagaggattataaatcatactgctataaagacacatgcacatgtatgtttattgcggcactattcacaatagcaaagacttggaaccaacccaaatgtccaaccgctatagactggattaagaaaatgtggcacatatacaccatggaatactatgcagccataaaaaatgatgagttcatgtcctttgtagggacatggatgaaactggaaaccatcattctcagcaaactatcgcaaggacaaaaaaccaaacactgcatgttctcactcataggtgggaattgaacaatgagaacacgtggacacaggaaggggaacatcacactctggggactgttgtggggtggggggagtggggagggatagcattaggagatatacctaatgctaaatgacgaattaatgggtgcagcacaccaacatggcacatgtatacatatgtaactaacctgcacattgtgcacatgtaccctaaaacttaaaagtataataataataaaatttaaaaaaaaaagaaagcattttccttaatattgttagctgttcttcagataagatgtttgactgccctaggtctcgagtatttttgacgggtttcaatgattaatgatacgtttttattaatcacttatgcttagcaactgcagggattttttaattaaaaacttgttattagattcagaatgacagtgatgatgcttaagttgggaaagaaatcatttgagttgtggtcttttctaccttgaatcttctctctgtaataaatcaccctgcttttgacagtgggaaatgttataatatttaagaaattaaagatgatttgtgttagctttaatggtttacatttgtatgtcagcttttctgtagaacaagtatagtattctgattctgtcatttgagaaacgagagattatattgcatttaaggtcatacacatgtggttttggtctttcacagttcaggatgacctaatttacatggaggtaatgaaaatagatcacttttatattattctagttagacaagtatcattattaccttttcagatctgtgcttcttcctacaggtttgcatgattaataaggttttgggtttttttcccctggtgtggttagaggaaagtttatagaacctattgttgcctatattattttaagcaaggatttgtttactaaaaacagtaaaattaagagaaaaatctctgaataccttcaatcacaacattttatttgtgttctacttggtagcttttaaagtaattctctggttaaaaaaagaaaaaaaatgagattttgtgtgttttcaccccaattttgtgatttatttttaactttatttgaaaacaaaaaagaattgtgtgtatagatatttcttttataatgtcaattaatactgattctgaaaatttccttttattattaggatgaaaaacattgctaatagaaacacaattttttttttcaaagcagagagtgaccaaagttgagagaaacagccctgaaattattttgattgaagtatcatacatatttattttgtttgatctaaaaatttacatctattgtatcctattttggtgttgcacaattagctactgatctctgcatgttaaaaatcagtggataataagagataaaacaaactgggaatgtgtttttagttacctttgaagtgataggcataaaacagaagactcaataacaataatagtaattcaaagaatgacagctaacacttggtactactgtgtgtcagttactatgtttagtacttcatatatattttcatttaatttttacaacactatgtaattgagagtattatttccattgagcacatgtttagattgaagaaagtggtagtcctactgtatgggtctgatgacatcttgtatactctgtgtagtactggtttttgaaggataacagtaaactgcagtagatgaggaaaatgttcatgaaagggagttgaagttaggcatattaaaggagacttcaccaaattctgctccctaagttaagcgtagtctctcagagatctcttctaatgttaaaatttatagaggaagttgggactgctagttaagaatgttttaacttccattcttaacatcttcatactttcccaaagtctcagtcaaaagataaagtgtcctcttgatcagtcacatccccaaatctgggcactttcatattcttaaggaatgtacacaattctttgtctttgtctctctattgtttttcctcaccctaagcgtgtgaacatattccaaaaataaagcactaataaaaaaattcttttatttatttcacattcgagtgtcatgtactagaagctactatataaagacaaataagatatagtcccagcactcaaagagcctggcttctaggaaagagaaaagacatgtaaacatgaatgttgtagatattaaacacacaagtaaataaaaccaaacatgttttcattaaagttttatatgtattatagtagaagtctacataggagcaaaaaggaaggactggccagttttccaggaaatggaggttgataaagggagcataaggcttgaattgactctgcaattctctttagctatattaacctgtctctcatctttctatatttcctgagttgggtaaagaaaagtatacatttaatgtctccactttcctctcatgtattcctcaaacctgtgccagtaggcattcaagtttgttaaatgataatggcttatgatagctaacatttatagagctcttgccctttgccaggcaccctaataacatgtttcacatatagtaacttgcttatttcttacagccactctctaagataagtactgttatcgtccccatgttagatacagacaactgaagcacagagaggttaaataccttgaccagtatcacaactaataactgttggaactgggcttcaaatctaggccgtttggctttgggacctatgcattatgagtgactggcgaacaaaattctctaaaaaggaattcgaggaaaagagacttttttttttttccagtgaacagtttgcaaaccagggaaacatagccttcggtgtaaaatgaagaatgcatttcagagaacaaagagaaggtttggattttatagaaaaatatgcttcccaaattcccaatcaggtccatttatgcaaatgaaagatttaaattcatgtagttccaaatagttggcacagtggagttctgagtcgttgctacaactgagccctcattggctgtggcaggtgagtcctgattggttgatttccaagctctaaaccagagatctctgtcagatgtttctttcaaatggctggcgggtggtgtagggtttttggtttatttatcttggcacagacatcaggaactggtttggcttgattgtagaaagggagggcctgtgacactttcacatctttctgagaacacagagtacgtgactgcttcttcacccaggatggcctcctggttctgttttactttgagcatctcagccacagggagtccattttgtctgttggataggggtatactttaacagactgaatgaacctagttgccttttacccatgtctgcacacaaatgcttatatactaaagttcatttatttccaaggcatacatttttcctagttttaatggattttcctttgtcctctcccttcactcattcaggaaattttgaatactcttatggccaagtactaatctagcattggaaatacagaaataaaagtggccactactatcacgaagctcatagtatgatgggagaaaatgtagaggaaaattataattataatatgacgtgctaagtgctatgatggtatgggcctaggggggcagtatttaacccagccagaagagggtaacccctaacctgaattatgatggaaaagtaggatttagctaagcctctttctattatttgtcctccctatttttttctatgtataatgggatacagttgctttttcaaaaccttcaattacccctttacgtatctgcacggttgcattgttccttctgttatcttctttgtcatgttctacttgcaagccttctcggtgtgtcttttactgtactttggtctccagtgtctttttcattcttatttcctttttagtttattcatcctatctagaaacttgtcttatctgctacagtaggaaatttaatttacttttcttcagctcctttcttcctctctggcaggctgccaagtgtttaaaacactcatgattattggtttcttcagagaggaagatagatctgggtcatacgcttgatgtcactgggatattcatttcatttttgttctttctgggcatcaaggggaattttaccccttgaagtctctcaattaaatcttgcccccaatttactgtttcttgggcatgttcctttaatgcgcctagcttttctatttttggcatgagtgcccaacatttactggatattggcacttggcacacagactggtgtctgctgaatgccagatatagccttctttacaaaacatgatgggaaaaattatgagggaaggtagtatttgactctggattcaaacacaggttgaattctaaccttttatcatttattagcacggtaaccttgggcaagttacttaacctctctctgcctcaattttctcatttttaaaatgggcaaactaatagtgactacctcattaggtttttagaggattaaatagattaatgcctttaaaattgagaacagtgagtggaatatagataaaaaaggaagacatttcataagtgcctggggttcccagcctctttggccaagtactgtttttccatccaactgtttggcccctgatttgcttttacctctcccttacttgttcatcagggatctggttttacttcaaattgtgcttattatcttttattttcctgtggttctcctctgctaatctaggtttttatagttctaatatccttttgtagtggaaaataatttgggagattgacaggaagacaataattgttgttaacagtgagattttatggcacatcgttggggtttatagtaataggtttttgtttcatatagcaatagggattgttcaaaagttaaaatttttttttgccatgcttatcattatgcatacttataagagattagaatatttcagaaatataaaactcagaaataaaagaagtattctctaagtatttagtgcttgctatgtgataagatactgttggaggtactgaaacataattgctattaatagtttggcattatttcttacagtttttttaaaaagatctgtatagtcataaaagttatgttatttatgaaaataagaatgataatgttttgttttgcaggaaaagtcaacactaataatatgctctagagaaactaacgcttacttagatgtttttaacattatagtaaactaatatgccgagcttcaaaatgacccaacatataacttgtagctgggatattttggtgcatttggcattatactgtaatttacagtatacaacatctgaggacttttagcagtatcttggcacaacagactgactcctcccatcccatcagaggtggagggaggaactcttttctccccataaattcttgatttttaattaattaattaactagtttttctagttttcatctcctctcttaatattggactttgatatttaccttttttattcatttaatttattttttaaaaatgttttggccagatgtggtggctcacgcctgtaatcccagcactttgggaggccaaggcaggtggatcacaaggtcaggagattgaggccatcctggctaacacggtgaaacgccgtctctactaaaaaatacaaaaaattagctgggcatggtggtgagtgcttgtagtcccagctactcgggaggctgaggcaggagaatggcatgaacccgggaggcagagcttgcagtgagccgagatggcaccattgcacacattggtctctgtgtcttttttcatgcaagtcccatgctgttttggttactgtagctctgtggtataatttgaagtcagtaatgtgattgctccagttttgtttttttttttttttgctcagaatggctttgactattctgagtctattgtgatttcatataaattttaacatgttttttctatttctgtgaagaatgtcattggtattttggtagggattacattgaatctgtagattgctttgggtagtctggacatttaaatgatattgattcttccaatccatgaacatgaaatatatttgtattttttggcatccttttcagttttttcattggcattttatagtttttattatagagatctttcacttctttggttaagttaatttgtatgtatttaattttatttgtagctattataaatgggattacttttttgatttcctttttaaattgttcactgttggcatatagaaatgctactgatttttgtatgtttattttgtatcctgaaactttattgaatttatcagttctagtggtttttttagtggagacttcagttttttccaagcataagatcgtatcatctgcaagcaagtttaatgtgacttcttccttttcagtatgaatgccctttatttttacttttttaaaaaatacttttattctaagttctgtggtacatgtgcagattgttacataggtaaatgtgtgtcatgggggtttgttgtacagattatttaatcatccaggtattaagtctagtaccctttaattacttttcctgatcctctgcctcctctcaccctcagccatccgatagaccctagtgtgtattgttcccctctgtgtgcccatgtgttctcaccattcagctcccacttacaagtgagaacatgcactattcagttttctgttcctgcgttagtttgctaaggatgatggtctccatctccatccatgtccctgcaaaggacatgatctcattttttttatggctacatattattccattgtgtgtatgtgccacattttctttatccagtctatcattgatgggcatttaggttgatttcatgtctttgctattgtgaatcgttttgcagtgaacatccgtgtgcatgtgtctttataatagaacaatttatatttctttgggtatacccagtaatgggattgctgggtcaaatggtatttctgtctttaggtctttgaggaatcgccacactgtcttccacaaaggcagaactaacttacactcccaccaacagtgtataagcatttctttttctccacaaccttgccagcatgtgttatttttgactttttaataatagccattctgactggtgtgaaatggtatctcattgtggttttgatttgcatttctctaatgatcagtgttgttgaggtttctttcattgattcttggccccatgtatgtctttttttgagagatgttcgttcatgtcctttgcccactttttaatggggttgtttttctcttgtaaatttatttaagttccttatagatgctggatattagacttttgtcagatgcataaattgcaaaaatgttctcccattctgtaaattgtctgtttactctgttgatagtgttttgttgttgttgtttttgctgtgccagaagctctttagtttaattagataccatttatcaatttttgcttctgttgcagttgcttttggcatcttcatcatgaaatatttgtgccgatgtctcgaatggtattgctgaggttgttttcaaggatttttatagttttgggttttacatttaagtcaataatctatcttgagttgatttttgtgcatggtgtaaggaaggggtccagttttaatcttctgcatatggctagccagttatcccagtgccatttattgaatagggaatcgtttccccattgcttgtttttgtcaggtttgttgcagatagttgtagatgtgtggtcttattcttgggttctctattctgttccattggtctatgtgtctgttcttatatcagtgccatgctgtcttggttaccatagccctgtagtatagtttgaagtaatgtagcatgatgtctccagctttgtttctttttgcttaggattgccttggctattcaagcttttctggggttccatatgaattttaaaatagtttttttgtagttctttgaagaatgtcaatggtagtttaatagaaatagcattgaatatgtaaattgcactgggcagtttggccattttcacaatattgcttcttcctgtatatgagcatggaatgtttttcatttgttttttcatctctgatttctttgagcagtggtttgtagttctccttgtagagatctttcatttccctagttagctgtattcctaggttgaatgtcctttatttctttctcttgtatgactgctttagctagaactttcagtactttgttggttaacagtggtgacagtgggcatccttgttttgttctagatcttagaggaaagactttcagtttttccccattcagtatgatactagctgtgggtctgtcatatttggcttttgttatattgaggtatatttcttctatccccattttttgagggtttttattatgaaggaatgatgaagtttattgagtgctttttcagcattaattgaaatgctcatatggtttttgtacttcattctgttgatatgatggatcacattgatttatttgcatatgtcaaaccattcttacatcccagggataaatcccatttggtcatgatgaatgattcttttaatgtattgttgaattcatgtttgcttgtattttgttgccaattttggatcagtgtacatcactgatattggcctacagtttcccttttttgatatgtcttttggtatcagggtaatactgaccttctagagtaagtctggaagtattccctcttcctctgtttttcagaatagtttgagtaggattggtattagttctttaaatatttgatagagttcaacagtgaagccatcaagtctcaagttattctttacttagaggctttattacgacttcgatcttgttacttattattgttctgttcagcttttggatttcctttttttttttttttttttttttttttttgagacggagtctcgctctgtcgcccaggctggagtgcagtggcgggatctcggctcactgcaagctccgcctcccgggttcacgccattctcctgcctcagcctcccaagtagctgggactacaggcgcccgccactacgcccggctaattttttgtatttttagtagagacggggtttcaccgttttagccgggatggtctcgatctcctgacctcgtgatccacccgcctcggcctcccaaagtgctgggattacaggcgtgagccaccgcgcccggcctggatttcttcatggttcaatgttggtaggttgtatatgtctaggaatttattaatttcttctagatttttccatttattggcatatggttgctcatagtagccacaaatgatcctttgaatttcttcagtatccattgtaatgtctcttttttatctccaattttatttattttggattgtgctgggtcacccctgaaacgagcatgtctcagagcccaaggtcaatggtgtactccatgggtatcagtggtggttgttcagggcccaagagttctttagttggcagatgataaatgcttccaggactgggttcttccctcaaggcagtgggatccttttcggcccagggtgtgtctagaaatgttatccaggagctggggcctggaattgaggcctcacgactctgcccattaccttattctactgtgagtgacctggtgtccaagatgcaagacagagtcctctttactctttgctgtcctctccttaagcagaaagaaggagacactttcatgctgggagcttcactgcctggagttgggggagtggtgacgcaagcactcccttaaccatgctagctggtgacttcgtcctttgttatatgtgagagtgactctttgttttctcaggatcccaaagtgctcattcaaagccatctctgtctgttttccaacactgtttatgtcaaattgtaggagaacacccgttggaactttctttacattctcttgctgccgtgttttaaagaatgaaggtacagcagtatgaattaatcatggtttctcagttgctgggcacctgccaccctatttcactagctctaagccaaggctagtgctaggagttgcctaggaattgcagtctttgcattctagatgcctttcaagtttacctaggatcccagagcatttcagcccgcagtgttgaggcttgctgagcaactcaagttccatctgctgcgatggatgtttccctgctggctagggctggtccaaatgctccctctgtgtgtgggagctagctgaacctaggatggctctatcctccgctgtgacagggcagcagtgaattcaatgtgaagtcccccagttgctgtgttccttatccccaaagtgtacaaattgcctttctgcaccacacggtggctgctgagggatgtgggtggggtggtatcagcaactcatgactgtctctccatccttcctcaatgcctcttttggtaatacaaagttaaaaccatgcgctgtgattgctcacctgatgtttggttcttatgacagtgtttttctttgtgcagatggttgttaaaatttggtgttccagggagtgtgggggtgtgattggtgtaggcttctattctgccatcttactctgccctctgaactttaatttataccataccagaaatcagagtgaaggtaaacaacaaggttacaatgtaactctattataaattttgatttttttttggtgacaaataccagtatatttttgtctttggatctataaattatttaatttagcaaactctaaagcttataaaatttaacttctcaagaagtctagcactttatggctattaattttactatcaaaatatccaggttactgaattcattttaataattataattcttctaaacatcatttgaagaattatttgtggacactagactcaagactacactaaatccaaacagtatacctaggacctgagttttgagtttttcatctcagttatctgtccttcaagttactacttcctcttatgctttcttttactaaccaaattttcagatttttacattggaccttctcctccaaggccctatgggacaactttgtaaatatgcatttacagcctttaaacaccaacattttaaactgagactaattcctgcaaccacatttcttgttaaaagttcagcactaggctgggcacggtggctcatgcctgtaatcccagcactttgggaggctgaggtggacagatcacttgaggtcaggagtttgagacccacctggccaaaatggtgaaacctcatctctactaaaaatataaaaaaaaaattagccgggtttggtggcgggcccctgtagtcccagctacttcggaggctgagacaggagaatcacttgaacccagaaggtgaaggttgcagtgagccgagatggtgccactgcactccagcctgggtgacagagccagactccgtctccaggaaaaaaaaaaaaaaaaaaaaaaaaaaaaagaagtttagcactaacagtatctttctgccattttcttctgctcaaggaactaaagaagtcaaacagataatggttctgcctgagccatttgtgaagtctaagaacagttacgtatactccctgttattctttcagggcattattttatccttttttttaaaccttgaaaaataggtgttacttagccttataaaattttgaagtaaagtttctgaatttctgtgaagaactcttcaagcaattcagcttttcaaacacagtcgtcacacaatagtccctgtaacatgggatttattccacagttaaaaagtgacttcctcctttgttatatgtgagagtggctgtttgttttctcaggatcccaaagtgctcattcaaagccatctctgtctgttttccaacactatttatgtcaaattgtaggggaacacccgttggaactttctttacattctcttgctgccgtgttttaaagaatgaaggtatagcagtatgaattaatcatggtttctcagttgctgggcattgtactgctccagggttatcaatagatacagtcagattcctgcgtttgtgatagatgtctggcattgactagttctctttgctactacatctagcagttgttccgtgttcaactgggcctgaaccttcttcaggcctcttccgaaaagaaaagttacctgtgaagtgtctttctgatggcttaatttatttcctctcctggtaaaactggacataatgttattttttctgtttagctggttaggtctcttgagaactgcaactggtttcctatgcacttcattttgtttcagaaggcttgcctttctttttaacactggaaaatagtgttctgtattcttgtcacttagacgtggacaatacatacataggactaattccttttccaattccagatgattttctaactgcaagtccagtgattatccataaggatgtctctttccaggcattactcttcctctgcagcttagactggttttaccaaaaccagaattctgttggagtacccattgtattctcatcctaaattgctggagtcttctgtttagttttggaaaattctgcttttttcctttctttcaattcagtttgatgacaccagccaaagacataccaattttgtcaaggtgtttgttgctgcgagctttcagcagctgtgacaaggtcactgtggcttctaccaactgggtaccaaactggttcatggctggaaatgtggtgctagaacagtcagtgcggaaggccagagttggaggcctgccatctctcatgcacacacgcaagcagactgccgggcagcatccttgtcctcccacccgtggttgccagcatagaccaatttatcccattcctttaaattacttgatagtgttctctggaatactcttgaatataccataatttagttagtaaaacatattgatggattgctgatagttcagtttcttactattacaagcagtgatacactaagaatcctgttacaaatatgtctttcgagtatgtgtttctggagaataaatttgatcaaatgatatattaacttagcatcttaataaattcaaaaagattgttcttatttaaacatcagccttcttacctgtttccttatgcttttaggaaaactaggtattatcaatttttatactctctgtcaatgtaattggtagatacgtttcattgttttaatttgcatttaaaagattcatgaaatggggttttctataacatttttattttagtcatgttttacatattgtgacctgtactgtgtcgatatccttagctcagttttctattggatttttctttattctattgattagtaagattgtggtatattagtgaaaatagccatttgtcaaatgttggaaatttttttgcttttaaaaaatatacatactctataccgtcatagattttttaaaattataggtagtcagatttttaaatctttttaatggtaacttgattttgttcttatgcttaggaattcctttccctacaagagtattatgaatttgaaagattttctgtcatcagtattattgtctaatttttattataatcaagatttataatatctaggaatgtttatttccttttctcttttttgttttcattgtgttcctagattttggtctctaatttggcatgtacaacataatcaaatagcctgaaaccttggcacattattagttactgtggatcagaatagagtattagatgggatgatcttggatcctgcttaattgaataccaatttataagtacctatacttggtaccaatttataagtgggccaactatcagtccttgtttgcgtgacatagtctaagtttaacctgtcttccagaataatttttttttttgagatgaggtctcactctgtcactcaggctggagtgcagtggcacaatcttggctcactgcaactgtggcctcccaggctcaagtgatcctcccatctcagcctcctgagtagctgggactataggagtacgccaccatgcccagctaattttttgtaattttgatagaaacagggttttaccatgttgcccaggctggtctcaaacccctgagctcaggccctccttggcctcccaaagtgctgggattacaggcctgagccactgcacttgaccaagaataatttttaatagtcctctttcactataaaaagtgcctcagtttaaataaaaaattataaatgttatagaagatagttgtttacatgggatagttcctcagggtattgtaacactaaagctttagttgtttctatttatatcattcagttgtttctatttacattacttctatagtagtaatatttcatttgctttaacttttaaaatatctgttattttcatgatgaacttattacaagcttcatacagttgcttatgtgaggtatttctagaacagtcatgctagtgtgtactctctttgccttcattttaattaacagaatgatgttcactttttgcattaaatgtcccttataattcttatttacctagtattgctttaaagatgatgaaacatttgtctctgtatgtggacatattttggttatattttactaaatgtgtcatcaaatcttttttgtatggctgtgacctaatgttttaacctggccaaataaaccattacttattacattaatgttttctgatgttgcatatacttggatcattggattttgtggtatgctaagtaatactactgttcttaacacagatccccgtgggagccactaaatgccaatccctcttatactgtcacagtgttgataaaactttggtacttgttatctgccagatagattttcagctatcttattttattccgatagtacttctccagccttttcttatgtagtactgtgtcaaagactattttataataggtacattgtgtctattgttctttctttcctttctctactacctctgctactgcttaaaaggtttatagagtttagtattggtcgttttcaccaccgattataaactgtaaatcaacccatattgtttcttaaactattattttacattttgaggtgtttgtaaaattgccatataaaaaggccagtttcaattttcctttagttaaaaataccttttttttttttttttttttttttacaaatacatcttaagaaacctaactttttttttttttttttacatttccggttgtttgtgtgtttatatcataatatgtatgtttctcagtgttatatttaggtatatatgtttggcccttaatttttatgtttgttggtcccattaataaaatttgagaatatctggtgagtagaacaccatatgggaatttccagttgtgctaccattagcctttaaacattagtctttggatacagctatttatttatattttcaatttcatgttatgtaaactgtatatgagattttcataaaagtttgttcttttaaaatatctaggcactgaagataaattaatgaaattcttactgttatttttgcaatgcatgtaataatatgaagagaagctggttttattagacatggagtcatgtttattgtatgatatataaagtatctactgtaatatataaaataatgtttgttggtttttgcgtttcttctgcagagagtgataatgaactctcaagtggaacaggtgatgtgtctaaggattgtcctgagaagatcctgtattcttggggagagttgctaggaaaatggtaaaattttatttttcatactgaaaattctatatttacatagttgatgttaatttgttgtattaaaatctgtgtgttaaaataggttttaaaggattaatattaaaatctatcttaatatcttaatattgtttaaaaacttaaaaattaaaatataatttatagatactctttatgtttggctaggtcttccccccaagtatggttttatttaacttgcttttagaagatgtctttgtcttattatttcactcagaccgtattatttgtcttattatttcacatcatttagcacagtcaattttatgctatattgccaatgcatttaaatgtctactgttaaagggttatgtttttttaaaaccaagtctattaccactaaaatgggctgtatagtttagaatttctcattttacgctgattgttaactgacacagcttgtttcattctttctgactaaaagtattactttaaattttggcgtattttatgtggaattacaaaaaaagtactctgtttatatttattatattaagtactttttatatttatgatacattttttaaaatggtaattatgactatcatatgttggtgtaatgaaaaaatcctgccaacaaaatacttccccatattagtatagacatagaaattcaatttattgttgaatatgcactcagattacatgcatgcgggtagtccaggggagactacaaagtctgggcggaatttcacagttcagtagaagaaagaataatttaaacctcttttatcctttcaagagaaaagtggatgctccttatgatagtctgtatgcatcttgagagtttccttagttgtaatttaggaaatatgtatttacagttccaacggttggaatactgatgatttttcattgtaaaatctggagattaggtttatcaaatttggaccaaagtattgggcctgttattgtttttaaggagataaaccctgaatggccagctgcttctcctttttaagcaaagaaaatttcattttatgtatccttacacatatcacataaaatgaacacatttcagagaacttatttaactcattaatgaatgtcaacataaaataatcaaaagggtcagaatctaatttaaaggtaatttattcaatagcaaaatatgagcatggaccacccagaaacaccacctctaaaggaatgcagtcagtggtccaaagtagggaagttaagatttcatttatataggcagaggcacaggagtttttagcaggattatgacattattcatacagggctggtgcatagttacagcagtttggttggttataggcagtgcttttttcggcggggggatgttaaaaattttttttaactttttttatagagggtacaataatcgtaggttttctgttatctggtctaagtgaagcagaatgacaaaagggatgttaacctataacaagggtcattaatgaagaaggcaggaggttttggtccttgacatcatttaattctctctagttatcgtacaaaacaagaaaaatgtgatttaatgtataatccaagaacagaagttgtaaccatatgtgactcagataacagtcacgtctctctcaagacttaaagtgttgttgtttttttttattccaacagcttttaggttttattttcacatggagcaccaataaggtattagagccaatcaaaataaggatttgatttagagatttattttctttacctggcaattcatttgcactaccatgaatgggagtcatttgcatagctatggacagtaaactttgcattgccattatgttatatatgttgagagttgtaaactagcctagtcaaagacaaaggcacacacttctatgttgtcacccaattcccagatgttccagccattctattgaaatgatgttcagttatcattttgtccatttcaaaaatcttacacaattttaccccacattatatccagaatctaacttactcatttgcaagcattgtccacctaaatgtacctcatatgtttttatctgttttatttagggttactctcttcctttaagatgaacagttctctttttagatggtcctgagttaggacagtttcaatgtgggatggagagcggcaggaagtgagatgggagagtgtgttctagttagaggcagatgactttttcagtctcagaccaggctgggaaacaggaagcatgctaaactttttaaacagaagcattttaatgcagataattggcttacaatgtgttagaaggttgagagagcagaaaggagatattatgattggagtaacccaagtagtaggaaacagctatggcctatgggactggagaaataaaatgaaagaagtattgttaccagagtctaggaactcagaggaggtctgaggagctgatgcagggatctctgaagagggctgcatcctggttgcttagaattatgaggatcctcatagcagctagtgtttagaaagaactgtcagggcaggggacaactgtttagttccacacttctgaagagatacccagatcttggagcaggtggggaggaccacatcattggtgctggtacttgttagcctggctagtattagtatttttcaggagttaacgatatagctggtgctggcaatggaattccttcttccattcttctgccttccaactgtacatcactattactcatgggcagaacctaacctgaaagccagtgggcaagggagtttgggatatgtagtctgcagattctcagcccttacatctttgagcagaatacagaagggtggacttgtagctgataggcagtgggtaaatgactacaaaagggtaaaagctgggcctaattctcatttacccatttatctggtccaattgaattaggctttcctgatacccaatgtttttagatagagatttatttattaggagcactgataagaaaaaaaacagcaccaacaacttgtcctaatcttcttcatctttggtctgaaagtgtacttttatggtccaaccatgtggatgtgattgatagtattggatgtaatggtagcgtatgcattgataccacagcttggctgctactgttacgtggtttcttcctttcccacttcaagttatttgctgggggaaggcttaggaatttacatggacctccatgcatcatagaaataagcaacgtgtctcctgcggcagctctactctctggacagagtttatttgtccctgattctctggtgaagaacaggggcatagtcttccgttgtggccacttcataaaacaaggactcccttcttactggctctcacattactgagaattgggtgcttactttttacgggcccaacacattctttctagtatagcaaaatacacaacacctaaaactaataccttatactccaattgaaattaatcagcaaaacagctcctagatatcaatatataggtattgtagaaactaattttctttggataaggtgtttcttcttgtccgtaatttactcccaaaggcaaaataatttcaacttgataagatctatcggaggggaatataatttaatgggaaaaatacattacgcttaaactcagaactgaattagacttccagttgtagtgctaacttgataggtagcttgcacaagttatttaacatttttaggttccatttttccagtgaagcttttataaacctgctcatgtatgcatgctttgtctttcagaagtggaataatgtttgcaaagtttttttgtgtgttttgtttttctttttcctagcccttagattgagaaaataccttaatttttattgtctttttatggtttgggattatatcaccattcttgaggaatttacaataacagtctgggctgtttcatttaagagaatatgtacaaacatctcactttcttgattcttagatgaaatttagttaaaagtcgacatgcttattgggagatatggcaaggtgagaatgtttgggaaaggaagtagagacagacattggatttttgtcagtcaagtttcttttgattttaaattatttattcattacattttctacatggcagttaatattctaaaactataaacaaaatttaatatagaaaaaatattatgcttttcttttttgcctttgcatgctcttatttcaaaatagatttaaaattcatggcatattatactagaaaacaagtctgtcaatgatctaagcttctatctttagatactaggaaaaaagagaaaaacccaaagcaagcagaagcaaggaaataagaacagaaataaatggaattgagaagaacacttcagaaaatcagtcaaactgaagctgatttttataaagattaatatgtttgataaagataaccatctaactagactgaccaagaaaaacaagggagagagagaacacagatacaagaatcaaagaggctacatcattacaaatcactacagacattacaaggatataaaataatattataagcaactcactgtctataaatttagaagcttaggtgaaatcgacaaacacttgaaagtcataaattgccaaagcttacttgaaataaataacctgaatactcctgtattagttgacaaaattgaattcatagtttaaaagttttcaatagagaaaatttgaggccaaaatggcaaattctaccaaatatttaagaaaaaaataataagactgggcacagtggctcatgcctgtaatcccagcacttcaggaggctgaggcgagccgatcacttgaggtaatgagtttgagaccagcctagccaacataatgaaaccctatctctactaaaaatatcaaaaaaattagccaggcatggtggtgtgcacctgtaatctcagctacccgggaggctgaggcacaagaattgcctgagcctaggaggcagaggttgcagtgagctcagattgtaccactgcactccagccagtgacagagcaagactctgtcagaaaataaagtagagtaaagtaaagtaaagaaaaggaaagaaggaaggagagaaagacagagagagatagagaaagagagaaggaaggagagagagaaagaaaaagaaagaaggaaagaaagtgaaggaaagaaaggaagaaagaaagagaaggaaggaaggaaaggaaagaaggaaggaaggaagggaaagaaggaaggaaggaaaaaatatataaattctacataaactttccagaatatataagtgaaggcaatactttccagctaatttatgtcatttgcttaccatgatatcaaaaccggatgaaaatattacagaaaagaaaattgcagacgagtgtccctcatggatatagactaaaaaagcctcaacaagtcctagcatatcaaatccaacaatatataaatttgaaaggataatgttgcatgactacgtgggacgtattttgggaatgcaaggctgctttgacatttgaaaataaatcagtgttattcacttatatcaataggctaaagaagaaaaaccatataatcatttcaatagatgcagaaaaagcatttgacccaattcagcattcattcttgatttaaaaaaaccaaaaaacaaaaaaacctctgagcaagctaggaatacaagggacctttcttaacctgataaaaggtacctatgaaaaacctgcagctaacatctaacttaagaatgacagatcccaaaactgggaataaggtagggatatctactctcatgactcttactcaacttagtactagaggtcttagcaagtgtaacaggcaagaaaaagaaataaaaggcaaacaagattggaaagaaaaatataacactgtctctatttgcagagatgtgattgtctgtgtagaaaaccccaaggaatctacaaaacaaacaaacaaaactcctagatctaataaatgagttttacaatgttaaaagatacaagatcaatatgtgcacatcagtttcatttctatacactggcagtgaaaaattggaaatagaaattttgaaacaaaaaagcaccataaaggaaaaccatgaaatatatagaaatcgaacaaattgtgagctaaatatatactttgacatactagaaaacagtaatcaaagacatcaaagaagacagaaataaatgaagatatatgctatgttcatggaatgaaaaaatctcaatattattaagatttcagtcattcccaaactaatcttaaaattagtgcatttccaataaaaatctcagcagattttttggtagcaaccaacaagctgattttaaaatttatataggaagcagagtaactagaatagccaaaacaattttgaaagtgaagaacacaatggaaaggcatattacctgatttctaggtttactgtagcactacagtagtcaaaagagtattgatacaaggatagacactgagattagtggcatagaaaagagagttcagaaatagagccacgcaatctaaacagacattttctaaagaagacatacaaatggccaagtagcacataaaaagatgctcaatatcattaaccatcagggaaatgccaatcaaagctacagtgagataccacttcatacccactacgatgtcaatcattacaaagacagataataacaagtgttggcaagaatgtggagacattgaaagcgtagcatagcaactgcaactcttttttttttttttaagattttattattattattttttattatactttaagttttagggtacatgtgcacattgtgcaggttagttacatatgtatacatgtgccatgctggtgcgctgcacccactaactcatcatctagcattaggtatatctcccaatgctatccctcccccctccccccaccccacaacagtccccagagtgtgatattccccttcctgtgtccatgtgatctcattgttcaattctcacctatgagtgagaatatgcggtgtttggttttttgttcttgcgatagtttactgagaatgatgatttccaatttcatccatgtccctacaaaggacatgaactcatcattttttacggctgcatagtattccatggtgtatatgtgccacattttcttaatccagtctatcattgttggacatttgggttggttccaagtctttgctattgtgaataatgccgcaataaacatacgtgtgtatgtgtctttatagcagcatgatttatagtcctttgggtatataccgagtaatgggatggctgggtcaaatggtatttctagttctagatccctgaggaatcgccacactgacttccacaatggttgaactagtttacagtcccaccaacagtgtaaaagtgttcctatttctccacatcctctccagcacctgttgtttcctgactttttaatgattgccattctgactggtgtgagatggtatctcattgtggttttgatttgcatttctctgatggccagtgatgatgagcattttttcatgtgttttttggctgcataaatgtcttctcttgagaagtgtctgttcatgtccttcgcccactttttgatgggattgtttgtttttttcttgtaaatttgtttgagttcattgtagattctggatatcagtcctttgtcagatgagtaggttgcgaaaattttctcccattttgtaggttgcctgttcactctgatggtagtttcttttgctgtgcagaagctctttagtttaattagatcccatttgtcaattttggcttttgttgccattgcttttggtgttttggacatgaagtccttgcccatgcctatgtcctgaatggtaatgcctaggttttcttctagggtttttatggttttaggtctaacgtttaaatctttaatccatcttgaattgatttttgtataaggtgtaaggaagggatccagtttcagctttctacatatggctagcgagttttcccagcaccatttattaaatagggaaccctttccccattgcttgtttttctcaggtttgtcaaagatcagatagttgtagatatgcggcgttatttctgagggctctgttctgttccattgatctatatctctgttttggtaccagtaccatgctgttttgggtactgtagccttgtagtatagtttgaagtcaggtagtgtgatgcctccagctttgttcttttggcttaggattgacttggcgatgcgggctgttttttggttccatatgaactttaaagtagttttttccaattctgtgaagaaagtcattggtagcttgatggggatggcattgaatctgtaaattaccttgggcagtatggccattttcacgatattgattcttcctacccatgagcatggcatgttcttccatttgtatgtatcctcttttatttccttgagcagtggtttgtagttctccttgaagaggtccttcacatcccttgtaagttggattcctaggtattttattctctttgaagcaattgtgaatgggagttcactcatgatttggctctctgtttgtctgttattggtgtataagaatgcttgtgatttttgtacattgattttgtatcctgagactttgctgaagttgcttatcagcttaaggagattttgggctgagacaatggggttttctagatatacaatcatgtcgtctgcaaacagggacaatttgacttcctcttttcctaattgaataccctttatttccttctcctgcctaattgccctggccagaacttccaacactaagttgaataggagtggtgagagagggcatccctgtcttgtgccagttttcaaagggaatgcttccagtttttgcccattcagtatgatattggctgtgggtttgtcatagatagctcttattattttgaaatacgtcccatcaatacctaatttattgagagtttttagcatgaagggttgttgaattttgtcaaaggctttttctgcatctattgagataatcatgtggtttttgtctttggctctgtttatatgctggattacatttattgatttgcgtatattgaaccagccttgcatcccagggttgaagcccacttgatcatggtggataagctttttgatgtgctgctggattcgttttgccagtattttattgaggatttttgcatcaatgttcatcaagtatattggtctaaaattctcttttttggttgtgtctctgcctggctttggtatcagaatgatgctggccttataaaatgagttagggaggattccctctttttctattgattggaatagtttcagaaggaatggtaccggttcctccttgtacctctggtagaattcggctgtgaatccatctggtcctggactctttttggttggtaaactattgattattgccacaatttcagctcctgttattggtctattcagagattcaacttcttcctggtttagtcttgggagagtgtatgtgtcaaggaatatatccatttcttctagattttctagtttatttgcgtagaggtgtttgtagtattctctgatggtagtttgtatttctgtgggatctgtgatgatatcccctttatcattttttattgtgtctatttgattcttctctctttttttctttattagtcttgctagcggtctatcaattttgttgatcctttcaaaaaaccagctcctggattcattgattttttgaagggttttttgtgtctctatttccttcagttctgctctgattttagttatttcttgccttctgctagcttttgaatgtgtttgctcttgcttttctagttcttttaattgtgatgttagggtgtcaattttggatctctcctgctttctcttgtgggcatttagtgctataaatttccctctacacactgctttgaatgcgtcccagagattctggtatgtggtgtctttgttctcgttggtttcaaagaacatctttatttctgccttcatttcgttatgtacccagtagtcattcaggagcaggttgttcagtttccatgtagttgagtggctttgagtgagattcttaatcctgagttctagtttgattgcactgtggtctgagagatagtttgttataatttctgttcttttacatttgctgaggagagctttacttccaactctgtggtcaattttggaataggtgtggtgtggtgctgaaaaaaatgtatattctgttgatttggggtggagagttctgtagatgtctattaggtccacttggtgcagagctgagttcaattcctgggtatccttgttgactttctgtctctttgatctgtctaatgttgacagtggggtgttaaagtctcccattattaatgtgtgggagtctaagtctctttgtaggtcactcaggacttgctttatgaatctgggtgctcctgtattgggtgcatatatatttaggatagttagctcttcttgttgaattgatccctttaccattatgtaatggccttctttgtctcttttgatctttgttggtgtaaagtctgttttatcagagactaggattgcaacccctgcctttttttgttttccatttgcttggtagatcttcctccatccttttattttgagcctatgtatgtctctgcacgtgagatgggtttcctgaatacagcacactgatgggtcttgactctttatccaatttgccagtctgtgtcttttaattggagcatttagtccatttacatttaaagttaatattgttatgtgtgaatttgatcctgtcattatgatgttagctggtgattttgctcattagttgatgcagtttcttcctagtctcgatggtctttacattttggcatgattttgcagcggctggtaccggttgttcctttccatgtttagcgcttccttcaggagctcttttagggcaggcctggtggtgacaaaatctgtcagcatttgcttgtctgtaaagtattttatttctccttcacttatgaagcttagtttggctggatatgaaattctgggttgaaaattcttttctttaagaatgttgaatattggcccccactctcttctggcttgtagggtttctgccgagagatccgctgttagtctgatgggcttccctttgagggtaacccgacctttctctctggctgcccttaacattttttccttcatttcaactttggtgaatctgacaattatgtgtcttggagttgctcttctcgaggagtatctttgtggcgttctctgtatttcctgaatctgaacgttggcctgccttgctagattggggaagttctcctggataatatcctgcagagtgttttccaacttggttccattgtccccatcactttcaggtacaccaatcagacgtagatttggtcttttcacatagtcccatatttcttggaggctttgctcatttctttttattcttttttctctaaacttcccttctcgcttcatttcattcatttcatcttccattgctgataccctttcttccagttgatcgcatcggctcctgaggcttctgcattcttcacgtagttctcgagccttggttttcagctccatcagctcctttaagcacttctctgtattggttattctagttatacattcttctaaatttttttcaaagttttcaacttctttgcctttggtttgaatgtcctcccgtagctcagagtaatttgatcgtctgaagccttcttctctcagcttgtcaaagtcattctccatccagctttgttccgttgctggtgaggaactgcgttcctttggaggaggagagacactctgcgttttagagtttccagtttttctgttctgttttttccccatctttgtggttttatgtacttttggtctttgatgatggtgatgtacagatgggttttcggtgtggatgtcctttctgtttgttagttttccttctaacagacaggaccctcagctgcaggtctgttggaataccctgcgatgtgaggtgtcagtgtgcccctgctggggggtgcctcccagttaggctgctcgggggtcaggggtcagggacccacttgaggaggcagtctgcccgttctcagatctccagctgcgtgctgggagaaccactgctctcttcaaagctgtcagacagggacatttaagtctgcagaggttactgctgtctttttgtttgtctgtgccctgccctcagaggtggagcctacagaggcaggcaggcctccttgagctgtggtgggctccacccagttcgagcttcctggctgctttgtttacctaagcaagcctgggcaatggcgggcgcccctcccccagcctcactgccgccttgcagtttgatctcagactgctgtgctagcaatcagcgagattccgttggcgtaggaccctctgagccaggtgtgggatataatctcgtggtgcgccgttttttaagccggtctggaaagggcaatattcgggtgggagtgacccgattttccaggtgcgtccgtcaccgctttctttgactgggaaagggaactccctgaccccttgcgcttcccaagtgaggcaatgcctcgccctgcttcggctcgcgcacggtgcgcgcacccactggcctgcacccactgtctggcactccctagtgagatgaacccggtacctcagatggaaatgcagaaatcacccgtcttctgcgtcgctcatgctgggagctgtagaccggagctgttcctattcggccatcttggctcctcctcgcaactgcaactctcatatgttgctggtggaaatacaaaatggtgtagccattttggaaaatagcatggtattttataaaattgaagacccttcttataccaccccagcaattccagtcccactgctgtgtgtttaccaaagtgaaattaaaacctgtatgtgaatgtttatgatagccttgctcataatcaccccaaactgcaaacaacccaaatgtccgtcaaaagtaaatggatcaaccaactgtggtatattcattgtatggaatgctactgagcaattaaaagaatgaactgatatacattacaactgatggatctcaagtgcatcatgttaagtgacctatgccaaagtcaagtgacttaatactatgttattccatttgtatgaaattctggaaaagtcaaaactatcatcataggaagcatgtcagtagttgttaaggactggtggtattgactacaagagggtccagggaatttgggtatggggggaatgagggaactatcctgtatcttggttatggtagtgctcacaaacctatgtgcatttgtcaaatctcacagaattgtatactaaaaatgtgaattttactctgtataaattgtgccttaaataaatgacaaaaaagaaaaaaaagccctgagttttaactgcagtaggtgctgaagcaagaatagtgtcactaaaccaaaaaaaaggaaaaaaaggaaaaaaaaaaagaaatttatgtcttatacatagatggctatttgaagtgtgttcttttctcttgtcagaacagtgccttcattataccttgcatatccatttttctctctttattttgtaatatttattataggtaactctgtcttaactaacttctctcttcttatcctgcaaagttatgtcaagtgcacatgacctccttaaagtcactgttgttttagagacatctcctgcagtttctagagtatagtaggtgctcaattcatatttattgactgaattttttgatgaaatatctcttaccactacagatttctgtccaattttatgaacattttatatatctatatttggtaattaattatcttgtcttatatagtgttttaagaaatctaagttgtaatattctctattaggttatacatagatttatttatcttatatctggcttcatcttgaaccctgggaatgttacttgactaatttgtgtcttgatcatgtcatggtgagatattttgatttagccattttaaaaacatcattctgactgcccagtgaaaaatggattataagggaacaaaggtggaagcaggcagattaggagaatgctattgtaaataatccaggggagagataattacatgttgcactaggctggtagcagagggtgacatgtgatcggattctggatatattttaagagagtactgactgtatttgcttctcttttctgtgtggcctgagaaaaataaataactggccactgatgtcagagtttttggcttgagctactagaagacttgctgtttactcaaatatagaagagagatttggaggataaaatcaagattttggagatgttgagatgcatttaagacatccaagtgactatgtccattaatcaatttcatgtaacattgagttcaaggaaaagatagggaaggaaatatgagtttgggagtcatcagtatatagatggtttttaaagctgttagaatgaaatgggcgagattacttacggagtgagtttagatgaagacatcatccgaagacatcatccaaagactgcaccctcgaccactccagtgtttgggagttggacgtatgaggaggatcaggcaaaggagcccaagaaagtacaaccagtgaggtgggaggagaatcaagatagaaatccagtaaactaagtctatcaagaatgacacagtagtcaagtgctgataggtgaagtctgatgaagcctagaattccactggattcaacaatttaggtgtcactggtgatcttaagaacagtttcaatggagaggcaggaatgaaagcccagctggattggaaatcagcagatatagatagctcttaaaaatagttttgctataaaaggatgataggaaacgaggacacattagtaagtggatgtgggttgagagttttttattaaaatgggcaatatagcatgtttgtatgttgttagaaaggatgtaacagaaaatttgatagtgtcagagaaagaggacataattgtaggataatttgatgaataggcaagaaaagatgtatatgttgactagtggaggggttgaatttgggagcagagatagctcattgtaacggaaggaaaggtgaggcatggctacagaggtaataactgacagttcagtgtacttactatgtgccaggttctgttctaagcactctccatgtgttaatttaattgttgcagcagctctctgaggtaggtattattatatcttcattttagaggtgagagaactgaggcatagctatattaggtagctagtgtaaaaatacagaaaacaaaatggcagcaactaagtaacttgctcaagatctcacagccaataagtaatttgcccatgatcatatcaagtaaatgacagagccagtttctgaatctaaaccactctggttttagagccagaacagggtgtgtgtgtgtgtgtgtttgtgtgtgtttgtgttttcttttttttttttgagatggagtttcactcttgttgcccaggctggagtgcaatggggcgatctcggctcactgcaacctccacctcctgggttcaagtgattctcctgcctcagcctcctgggtagctgggattacaggtatgggccaccacgcctggctaattttttgtatctttagtagagacggagtttcaccatgttggccgggctggtcttgaactcctgacctcatgatctgcctgccttggcctcccaaagtgctgggattacaggtgtgagccaccgcaccggcctagattagtttttataagagcatgtagaagttctagtgagtaagtgaataaactaggaaaatcgataaccctggcccaggcagtacttgaagcttctagtcatgattttaaagagagattatgagaatggcagtatggtgggtaagaaaacaaaatattttgatgactaaataaacagtcaaatagagatctccactcagtttctaaaatgcaagatttattacttgcttcaatataaatttatgaggcatcatcttagactcttagagttacatagaaaacaacatagtttctacctttgaggtttataatcaatgtaggtgggaatgcatactcataagagattatttaacaaagtaactgaaacactgaggctgtttcacatttcttgaccactttttttcctgtaaaacaagtcacttcattcattcattcattcaacttttaagtcttaatcatctattctttcttggggactttaacagacactgctgatttaaagatgagtaaggatagtttctaccctcaaggtttaccatgttatagaggcatgcagacctttaaacagaaaattgtgatattatcaataaatccttctgtaagcattgtagacctaatggaaatttttgaatgtacacagaaataaaataatacaatgaagtctcatgtgcccactgcccaacttcaataaagacaatatctaacaaatttctttaagctgagactcccattgggtttttcttttttttttttggaaggtaatattggagtaggaagaacattgattaacagagaaacaaattgggaagtaattgcatgggttgatgatatttataccagactcactgaccctatgtacagagatgaggctccaaatgggaaaagacttctgaggtagaaatgacagggttgctcagctgaaattcagtgtacatttttttcagaaataaaatatttctaataatatttttattaatggactttaggaaattatttaaagatctgagggaactgttttaaaaaactaacataattgattcttagacctttagaaaacttgttggattttttacaattcaaattttttttatttgggccattattataattatgtcatgatatgaaaagggtaacatttgtgtaaactacagaagtataaactactatgtcttttatacgaggattgtcaaatatttttaattgtgctcaaatttctttttgaaacattcgatttagaaatttcctaagtgtcgggaaaaataggtaggcatttacatatagacatttttgtgatttatgtaggtaaagcacctgtcatgtggagtcctacactttgtgctttggggaaatattttttaaagtgaggatacagtatatatgctcagtgaaattttaaacgtgtttgaaaagattttgaacttactcttaaatagctagatcattcttttaaaaaagcaaaacatgaataaagtcagaattcttataattaaatacactatcagaaagatgtaaaggaaaaatatttcaatactaatttgaaatcattagaaaaaataaaaataatatagaaaactaagaacagactgtataaaaagttcagtactggaggtctttataacagattggagatacaggtgtattgaaataactacatgaaaaaagcacataagctaaagaaagaaaggttgagagagagagagagaaaacatttgggataggagaacttgtaaaaacaaaactaaacgtggtagcaagatttcttttatatgttgaatatattcagaatggtaatgctgatgatttaactattatttaaataatttaaaggattaggcagaataatatctggataactgcttcaggttttgagatgcatggaaaacttaaaaaagtttaaagacaaaaataaaggtagtgcttactgtgaatacttagtaagtcaacttttagcaggaagaatatgcaggaagattttctaaccaaaaagactaagtgaacattggaggaaaataattgggtattggattattacatcaagtaaagtcaccttcaaatcggtcattcttttttattgagtaagagaaaattggtacatagccacctacttccacctcctatcaaaatttctgtaattccattggtgacttttcagtggtcacattcaatgacttttatccccctcatctcttgctttttctgctgtttttattgaataagagaaaattgatacatatttagtaggcattttaattgtattttcatggctattcattacttatcagcagagtgggaaaatgtattctgaattaatatgcttttcatcttcataatgacctttaatctatcctttttcttgaaacatttcttaatgtaggtcgtataacttctccgtatctagttcttctcattattgcgggatggagaaatctccgacctttcttgatgccacctcatcttttaatttcagttatagtcttttcctttctagagagaactttttcaaataggtcatgctgctggtgtcatattctcatatctcatagccacctacttccacctcctatcaaaatttctctaattccattggtgacttttcagtggtcacattcaatgacttttatccccctcatctcttgctttttctgctgtttttgttagaaataactctttccctttgaaattttatctcccaatagacatctttaaaagtagagttcttatatgcctaagtagtttcaagaaaatcctctttgaaagcaaaggaaatccactagatgagtccatgacatttttttgatcctattaaattcagtgagaatgtttgcttctaaaaaagcattcttttttgtttagctttagtaattgacatattaatttcatttcataattatattcattcacttaccaaaaatgtattaaatgccttttatatgtggggcactgtttctaggtgcttaagatatataagtaaagaagacaaagattcttgccattgtggagtttctattcatgcattaaaacctagccaattactgtatgattaatagatatttgatttatgtatgactttaaaaataattgtattaggtatccgtcttgtttctagggtagagttcagcatgtatcataactagttgcctattttcaagttcctgataactgcagttaatgtatcaaagcaatggcaatgtgtaattacattttaatcagaaatattgaaagcaatgattatttttataaatttctcttttatttatttggatcttctctgatcatagatatatactagcagcatctagcttaatatttattagtacttctcaagtgatagggtgctgtatgcagtataattgctgtactgttacttgggataaccagtaaaataaggctgttaatcaagcagtgttatgagtgacccagttctttttaaatgcctgtctctaaagataaatagtgctttgatttttaagagaggagaaaagacattttcattatgcctggccaaacaagtggctgagggtcagctagaaactgaatgtcaattgagttagattatattatggtaaagtattcattggggactgttgactattaatcttaaggagtatgtttatgtacgtgtgtatgcatgtgtaggaagagatattcaaactttaaaatatagttaaatcattatgttattatatatcattatataaaatattacagttaaatcattatgcaaaataatctgggccaaccgagtatttaatcaagctgcttgttactttcattctgcctacaatgttggaaatatgttatagtaggtccagtgaatgttaggaggctattgcagaagtctggggaggataaagttggttgcagttgagatggaagtgcatgaactttgtagaggttgagaaaataagatgtattagacttggtggtggattagtaatagatgatggggcaaaaataattcctaggtttccagtttggatggagtgtggtaacaatttctgaggtggaataccctggaaaacgaccaggttagggagaagaaactgagttcagacttgggcatactgactttgaggtgcctttgagcttctagaacttgggatacatgtttataggtgataatgcctagagacaagagaatgaaagaaaagggcaagagtaaagagagataacttcaagcccttaagaggttaatagaggagaagcaatcaacaatggagtttgtgaaggtggataaagaagtagtgctttgtcactgaagccaagggaaacagattggtccacagtgaaaggagtgaaaatatgtcttgaatccagtggggcatggagagaagtcatagatcatttaagtgaaaacttttcaaggagagatgcagaagccatgttgaactgaattgaggtaggagttggaggggaagaaatagagatagtgcttccataccaactcttgaaatttgttgcacagggtaagagtgtgatggagaattgcgcatggcattgaagaaaggatttttttcaatgttcttaatttttaaattttgagacagagtttcactctgatgccctgcctggtgtgaccttagctcatttggtctcaacctctgaggctcaggtgattctcccacctcagcctcccaagtagctggaactacaggcacatgccaccatggccggctaagttttttgtattttgttttttttctagagatgaggttttgccatgttgcccagtctggaactggtctggaactggtctgaacgcctgggctcaaacgatccgcctgctttggcctcccaaagtgctgggattatggatatgagccactgtgcccagccaagaaaggattctttcacatgcagttttaattaatttaatttattggagttttaatagctgtagagacacagtgatgacttgctgatctctatataacatgtaacatatactatatttaactactttggatttcccttacatgatattataaattattggactcataatttagaatattttgcatttaatttgagaggaaatgacctttgctctttgtacatcattgcttttaattaacccagttttctatactaatacccttaacccatatgtttttcctattcaacagtataatcacagccaaacattaaattacaaaaagatccttttatgactaatcctggctctcttgtggcataatattccttgtcaaatagtttattcaggtggaagtcttctgaagaataattaatactcttcctctacttgacatattttgtgaagcataattatctatgatgtttttccaaattaactaaaattatgttttaatttaaagccacgagagaagtttaaagaattgaaatgacttcttgtgttttatgattataaaagaatttaaaatcattataaatatttcagacagcataggaaaataaaagggctactttcccttttaattctattacacagatattttggagtatgttcttccatattatttttctatgcatgtctaaaagcaggtttcaaaatagcggttatggaggtgtatttaaactaacacctatttactaatttgaaacttgcttttgtcacttggcagcataactgttattttaaggtatggtagcacgttaagtcatataaactctgcctttctctagtttatttttgcttcaagcccatcagtattatcagcttagtttctctaacccaacaatacaaaagcttagctagaaaaggctaaaagaaaccattaaatctgatggtttactaaaattattaatgggatgagtttacttgaacttgtttcagttgtggaagttttagtttttttctgagatagcccaaatatgacagtatggggaaagcaaggaatatattttcagaggaaggtatgccaatactggggtttgagctagaggtagaagagtgtgtataatctagtgaagcaggtgggaggccacttttagaaaatagacatgtggattctatgactttcgaggctcaaaacttgaaaccagagcctggggtgttagatcaaaccagagtacattgtcaaggtttggagtcccagtggttgcaccagagtcagctctaatagataaaaaatgagcaacaaatacaagtaaagtctgagcaaaaaggcatagaatatagttccagattcaagctaggcaccaggaaaaagatgacaaatgaaattgcattcacaatattgagatatgcaattcagtttcttggtcagatgggcatagtagcatatttactatgttgtgatcattgattttaggaggagagatctttgcctttgttctgacgctgcacacctttgggatgtggtaaagcctgataagtatgtgttgcttccccagcaagttggagttgttgtgtaggttctggtgattgtaggaaagggttaggtccttcctttaatgagcacttgctgttgtaacaagtcagggagacaaattcagacatgtaaacaataatgaactcttcttactagaaaacctatcttaggttgttttaacttggaggttcattgatatctaagtttatgcttgaacaaagaattccaagttaggtcatcaagagatagggcttcctggaggacctgggagtcaggatgtggccgccaggtaaaacttgactataatatgtatgccttatgcctcctatactgtggagtctgtctttggcacttggcccagctcagcttggcctcagagaagtgggtatagtcaaggtgtgataggcctatgatccgttttcaacatcatttcctgaaccctatttcctaccacacatcattgtccagcttgctgtacattcatttcagggaatccagatggttctttttatgccttgaaatgttgcctagcaatatataactaacacgttaattattatgagtaagtccataggatgatttttaaaagtaagtgagaagaagaacaagcttttcctggaggtagaattacctggttcaccaataagaagatgagatcaataaaaaaattgaagatataactgagcttaagcagtactattgtttaatgcccccccacaaactgttttctcttgacccaagcttacacttttatataaactagtatacttttcatggcaacagcagttcaggagttgtaaaggaagtgtgaatggattattttcttgtcttctcaggcacagtaaccttggtgcacgaccgaaagggctgtctactctggtgaagagtggtgtccctgaagcattgagggcagaggtatggcagttattggcaggctgccatgacaaccaggcaatgctggatagataccgaattcttatcacaaaggtaggaagaagttcttttcatattattttcattggatgacctattaaataaatcctagttttcatagctcccataagtcataaatgctttgaacttcttcatgaatatattgaggtcgtgaagtcagtacttctaccttttgttctgaacacttgtagtggtaaacaatgcacttagtcatctatgaacattgtatgccttggtttttatcttttcattcaagtgattttataatagctatttaccaaattggaatatatttatatttcaagtgttttctaacttttcaattaaccttttttaattgtatgagatttatatagttataatcatacatagttactcttgtataattttacaataacattaaaatgaaattaaaaattcttctgtgcttatgtcaccttacatttaaataatgtagatacttgccctttttctgtcaggggcccttggttccactgtaaattcctttgcttatgtctaaatacctggttttagagcataagtaaaggtaggtgttggccttgaccctggactcaccaccctaggtcttaccacctaattacttaatctactctaagtactgtattttaaaataatagtaaaattttattttttaatttaaaggaacctctcctcataaatgagatttttataatcaagactttgttcctcagactatatgaacttttagaactttttatctgctgtaatttctttttacttttctttcctctttgcctccttcccttccataaatattttctgagtgcctagtataattatcactgctgaattcagttttttttttttaatttaactttttttttttaaattgatggcctctgcattggaatatgcaagatgatccattggtgtgtgggaaaaaatgtccaaagttccatttgtatttcttttaaataagtacaccaaaggatactaagctgtactaatatttggtgtgccatagtactgaggctttatgaggtccttgggtccagtggccactggtcccacatggttcaggagtgaccttagggaagaatggaacttacacactttggaggaataattgtggggctcacactcgtatattaacttccaaaatattataggtttcttgcagtttgcatgtgttagattaagtggatttacaggttatctagatgtaacttaatcctcataaaatgtgtgattggcttaaaaagattactatcacaggatgctgcatgtcaagttttttttttaatttaatatgttccttcagggaagaattaatattatgataatgacaaagcaactacttttggaaacaaactcatgtaacaaagatggacattttgaaacatatggcggtttaaacacctctgtgatttttttcattgaaataacatgcatcactataaaaaactcttacatcttcacacttaaaaacctggaatcagaaactttaaatatgtttaaaacttatacaagtagttgcagagaatttggaactgattgttaaaagcatataaacacaacaccttctgatttgttcatatgaatatctagaagctggtgtggtggcatatgcctggagtctcagctattgagaggctgaagtgggaggactgcctgaggccaggaacttgcacctgtgactagccactacactttggcttgggcaacatagcaagaccctgtctctaaaaaaaaaaaaaaaaagaaagaatacctagagaaagtagatatttcctagccaaatttcaacaaaatgattgatgagtgggactgaaaaaatgatgtacgtctacttgggtctgtggatctttgtaagtcttttttagatatgataacaaaaccatgaatcaaaaaactgatgcagaaacaagttttcattgttgttttataaactgctataacaaacatattaaaaatagtgacccatattttatgattatttttatataaaatgtttagaataggcaaacctatagagacagaaagtagactaatagttgccaggggttggaggaaaaaggaattgggggtcactgctaacagatatatggagtttgtttttagatgatggaaatattctggaattagacggtggtgacagttgctcaagattatgaatatactaaaaaccactgaattgtacacttctaaatggtgaattttatgttatgtttaacacaatagaaaaatttcacacacacaaaaaaagatccatattcaatattgaatagtattttatagcatttttaattatcttttttacatcctatctaaatttctgtgctttataatatctataatatattagtataatagcacttgtacatgataaatatatatatgttagatatttatgcctagaagtttttatcgatggagtatctgattgaaattttcagagatcataactctgggtatcaaattactttttcttgtaaataataaactaaattatatacttttattggctgccatggggtaggaggtaactgccataccccttttttcactaagaggctttcataattcatacctttaaaaattttaagggaaaaatgtaaagaataccatcccctgatattatttatgaattcttgataaacagtgtatgttcatatagtgagaaaatttttatcatttataccaaacaccatggtagttttaactatacaacttgcaaaaaatactttaagatcaagagatagggctgggctcagtggttcatgcctgtaattccaacagtttggaaggtggaggtgggaggatggcttgagcccacgatttcaagaccagcctaggctacatagtgagacgctgtctctacaaaaaaaaaaaaaaaaattagctgggcatggttgcacatacctgtagtcccagctgtttgagaggctgagatgggaggattgcttgagcccaggagatcgaggctgcagtgggctgtgattgtgccatcaaacttcagttcagctggggtgacagagtgagacccagtctcaaaccacaaaaaacagaatggcaaaaatcattttcattgaataaaatatatggaagatacttggaggctgataaattacattttttagatttcttccctctggagttctagctgtgatttactttctgccagtgaagattgcggggaggcaaaagccatattttctctggcagtgtggttggcagatacctgggcttcaccagttgtgaggtttttgcatctgcctctgggcatttcattctcaatcacttgccttcactctggggttactgtttcctgtggtttcctatcctgagtggccacagcagccttctgattctctggactgtagctgtggtgacacacctaaagagctggaagggcaaaagactgctacagcaggatgttcagtcttcagtcttttgccctttcagctctttcagtgtttaaggaccttcattcctgcattacatcttttttgaaatagtttacctgattaaaccctgtctgatacacttggcatgtatttttctccttgttttcacaagatggcttttctacacccagcattacatttagaaaagaagaaaagaaaaacaaagtctactcaaggtagccagacttgaggctaagagcccagtcctccagactgccagctttgttcaagacttctgacatcagccacaatttgggggttcttagtgccaccctgacttcagaccaactagcttcaaacttgtagatcctcacagacttcctcaggtttgataatttgcgagaataactcacagaactcagtaaagtgctatacttaaacaattgtagtttagtgtttttgtttgtttgtttttttagtagcaaaaagatacaaatctgaaccagccaaaggaagacatgtatagggcagaatgtgggactaggagaattccaaatttgaagcttccatcattctcacggatatgttaccctcctggtattatcctcaagggctcattacctgcctagcatcaatatgtagcaatatacacttggaatattgccaatcaggaagctcacctagttttggtgtccagagtttttattggagttttattacataggcatgattgattggatcattacctatctggtagaactcaatctctacgctccccttctttcctccccagaggaaaagaaggtagggacacagccaaaccatattgtattggggctgttgcgtggctcaaaaccccagtgctgtaatcacatggtcggtctttgtggcttggccagcctacgtcatgagtcttcttcttagtgtaaactatctgggggcttaccatgaatcatctgattaacataaactatcagatgtggttagaggggcccaccacaaataacaatcctgttattcaggaaatttcaagggttaaaaggttactgtccatgggctggaaaaaaggctagacctctctttggcatttctgaacccagtctatcacccttttaaagactttttcttaagcaccaaacaacaactccatctatatattcttgaccagaattctggctactatcttcatggaaaactagaaatgttttttaaaagatagacacattgatttatccctccacccccgaaaatctaggctttttgtaaacaggaaagagaaaataggtattgagtagaaaactacctttctgttccccaactgcctcttaatagtgacactagttgagatctattatggaatgaattattctaaaaatatatgtaaacttaatttattttagaactgtaaatatttactaattgccacttgagattgattagcaatgtgtaattcagttagtataataaatattttcacattcagcttataaatctatgacaactttaagtttttaatgttatttctattgttaatacagttatcaaaaacattttcatacaaacaatatagaaatgtgtggctctaatcatgtgcgtttattcagggtctcaaatcataagacttctttgacataaagtacagtggtatatttaatttcattgtcttccttgcattatagtaaaatgaataatgtcattttttctaaaaatgattttttcctttcactgtccttggggtagcaatgagatgacaagtgcctgtagccaagagtgtatgtgggtactttggtggtgaatacatctgagcttatagtcactaagtggaaagggcatgaacactcaagagtattttctgtaagaagtgcctgcatatttggcacttgttggtcatggttcagcagctgttcgtcctttcttttggtccagttaatttttcctgtcttattaagggaatggcaagatttcaaggttagttaatgaaatggttcagcttgaacaaacaattgctttataaaaaattgctttataaaaaccctaccagaggcctcagattacacagggaagaaggaatatgaagtattttatatttgtctgttctcacactgctataaggacctacctgagactgggcaatttataaaggaaagaggtttaattgactcacagtttcacagggctgggaggcctcagcaaatttacaatcgtggcggaaagggaagctaacacatccttcttctcatggtggcagaaaggagaagaatgagcaggggaaatgccagatgcttataaaaccatcagatctcgtgggaactcattatcacgagaacactgtggggtaaaccgcccccatgattcggttatctccacctggtccctcccacgacacatgaggattatgggaactacaattcaaatgagatttgggtagggacacagccaaaccatatcatatttcagaaaatttacttaaggtttggcttccatgaaaaagtagtctaccatttaaatctatagtaggaatgtactggtttagaatttgaacccacaaatcacattctgaagcattctttcaggggtggcaaatatacagccagcaggctaggtggagcctacaaatatgctttgtatggctatcaatacatcaaagaatggtatacacttagggattaaatttatactttcttttgccatgggcgtattactctattacttactctctatcttttataccttttaatgcctgtttggtcctcaaatatattcgattttgtgactccattataatactatgtcagcagccattgcttgcttcagaggagggggctatcacagtgtgcttgcaattgattaatgtctgcttccccagcagactttaaaatccacaggagcaaagaccacaactgtattgctccttatgaaatagcctatgcctggcatagggcctgcctgacacattctagatgataaataaaattttttccctcctaagaggagcataaggtcatagttgacttatttgtatagttatttattctgtttttcttttccatcaactatagccttatattgtgttaggtcctggataaagcttttaagtatgaagcaatgtcttttttgtaggaaacctattcatcttgttggggagagctataagcaatggattaatttgagcagctgttcctggtgaactaacctcttctctttttgccagggaggaggtggcagccattaagaattagtaccctagagaattttgcaatggtagtgggtcatgtagattgagtcaccttgaatcatggtaggtcaatgattggcctgccatggtaggatagacagtaatattgaacatagaatagggccgggattacaatgtggaacaattatactttatatggtcttgttggttttataatctatagaaaataaagttcttcatatcattttgactggtagtaaatgactctagggaccaaagtttaaaaaagggtgaaaatctctggatgagattcaagtgaaaatgaagcaggttaggagctgtagaccaactgataacctcaatctggaaccaaggaccaagcaggaccagtcagaagagctgttatatgtaaatccgtgttgaatcactctccacttcagaaggagctttcaggcacaccttgccttggtaacagtggtagcttcgctttaggaggagattttagtgctcactatgcaggaagaccctgggttcgaatctcaaattctgctacttactggttggtgaccttgggcaagctccttaactatcttcagtctcacttccttttttggtaaaataggcataataatatgtatcttacaggattgttgtgagaatttagtaagataatttatataaagcactcaatgcatgcctaatacatgataagcactcacccgtgatggggaatgaggaaaattataaagcaatatatgcataaatgaagtttgaagtaagctttcggaattaacatcatcagaaagtactataggaaatatggagattactgtgggctcttgaggtccgtgcaggtttcaagacattcatctgagaaatggggagaaagaaaacaggaagtgtgtagcaccctgttatctacttgtaccgctaattcattcattatttatcaaacagtatctcttctgtatcagaggctatgctaagcactagacatgtaaagaagactaatacctataccctatccttgaggagtttacagcccagtgggggaagatagtcaaaaaggcaaagaagcagcgataacatggttaagcactgtgacacaggtatgagcaaagtgacaagtgaggacaaagactggatacagccatttctgcctaggaacagagaatgggagtatgtgtttaggctgaggcaatgccatacataaacacacagagttgtgaaaggtcctgccatggtcaggggctgtaagaagttcagtatgacccatgggagtactctagactctacagtctaagtgagcaaagatggtatctgggttttgctcactgctctaaccttagtactcaatgctaggactgcccctcagtagatgctaaacgcttcctgaaggatttaatggggtatgtgggagacattatgtctagtgctttcatatatcctttccatgtaagcctcacagcttctgtaatatgattcccatttttaccatcaagaaaactgtcacatggttactaaatagtagaatccgtgaactcaaaaacccaaaactagaatgaaagggacaactcatccctacttttggtcttgtaaagatcctttagaaaaactctatatttttctgatcatcagttattaagagtaataaagaaaaggttgaagaaataaaagcactatctcatttctatatactgttcattgtatggaaatgaaaatttataattcagaaactattctatcaggaaacacatataaaccttagaagtcagtgagtaagaaagaagttctaaagcgcctaacttcaagtcatctcttttaagatgagtcttgagccttcaaccattgtctgttgttacatgattcctgccactgagttgtagggtactactgctgctgatgaatcactggaagacttttaccacatatttctgaaatcctatgtcctttattgtttatcattgagatgtttttattattcctgttaagctgcatttttcataacgtttgaggtgatctgaaacgacaatagaaggatcatgaccttgttcctgtgtagaaacaagcaaacagtatttagagcttctgaaatgagtacttcttaattgttggcttgaggacccactaagcaatgatcacattttcacatattcttagccatttgaaatggagattgtgtatgttttagggcaagtcaaattttatgtagcatgacagaactgtgtgtgtactttcagtaattgtatgacatatatggtatagtttgcctatcatatctgctggtttatataacataggaaatattagattgtagttgtgtggtcttttgtaaaaatgatcttgtatgtaacgtgtgtactgtatactttgttaaaatcaaaagatgcttttaattgataagcttttagaaataataatgccatgaggtgtttctctctaccacttgaattcctgtttttctcccaaatgaatcttttctttcgaaagtgtatgtggttatatatgagagtgtgtgtgtgtgtgtgtgtgtgtgtgtgtgtgtgtgtgtatatatatgtgtataccatttcttttcttctctcttttttttttttaagagacagggtctcaccatgttgctcaaactggagtggtggctcttcacaggtgtgatcatagtgcactgcagttcattcttttaaaaggatttaagtgctagtgtttgatagacctggatttaagattcacctctcccatgtattaatttgtgatcttggaacattgtcccaacattctaagcctcagtttcatcatttttaaagcaggcttaatagtagtatctaccgggatttttgtgtaaattacataaaatgatgaagtgcttggcgtatagtaagtactcatgattagcttctgctatctttatcaatatgatattacatcatgaacaacagtaatagcaatgttaatattaataatggatattggtgtcagggcatgtttctaatttaatacatgtgttaggtaacttccagttacaaagtttttataagagcacatgatgtgtataatagctgattatactgaaatacgaagtgtcagatttgtatttttctggtttgggatttttttttttttggttggtgaatatcatggagtatttgcattctaaaatttgactttgtattggttatatgaattattttagtgattatgcaaattcaactatatagtaaagtcaaattatattctctaaaaatcactcctaaatactgtgttatataatcaagactagaaggcaggtattactctcattcacttattaattcacttattcaccaactcttgattgatcaacttttatgggctaggctctctattgtttctagggctatgtagatcaaaagacttcacacccttgaggagtccagcctagggaaagccaggcttatgcactgatagataactttattatgatacaagttataataactgtcttaatcaaatgtgtagaatacagaagagatcgtgacagctctgcttgagtgagccagggaagacttcacagaggagagaatatctgaggtgggacttgaagaatatttctgagcaggataggagagggcatgtagtatagggagtggcttatgtagtttttcagcttccatttaatgagttagcttgggttatccagaaagcctttgagagttaaatcagtatgttccttccttcccctactctcatcctagttggccagcttcatctatttatgcatcaatgcgttaaatagaaacttaatgtaagtttattcttgttagaacaaatacatatcatggtaagcctcgggaaatatatgtcatgtcaaaatgatagcacaaaagaatatttaattggtcatctagggttgatgtaataaggttttaacctattaaagcatctattcagttcatctttaagtacctattgtgtgtcaggtactgtgctaggataataatacatattaattttttaaattaattaactgaaaaaatatcgattgactaaagtaaaacaatataaacttgcaaagaggcagcactgttttataaactccagagagcatttgtttaaacctgtatcagacagcaaaaagggcaatagttgcaaatattaatttggtagttgctggcaaaaattctttttgaaataataaaaaacaactgcaagagtggcccattttaagattctgaaaattctctgctttcttgagcattatatggacagaaaaattttccctgcatttattcacatcagattactggtactgctcagagtaaagcctgtcttctttctgttctccagtgtataattgtagcagatggcttttaataaaacatttagctaaagaagaatttttactctgggttggtggaatgtattataatgataatattggaaattctcaagaggagatgtttaatttggtatttttcttttgattgaataatgtttggtgaataattgaaaagtcaaattatagtatctgctacatcgttttttatttgttaagtttcaaaactaaattaaatcatgtagatgagtcatgtagccaagtaaatatttgctttttctttacatggtttactttttaaacattaaggcagtttatcctagtaaaataacactcaatactagattttattgagagtcagagcatcgcttaattatatggctgctctgttctctgtcatcaccttgtctaggtgtaggctttgagctttttgatagaatgaggttattccagctgtgtctgtaccattggtatttataaaaaccacaggctgttgtataaaaaccacattactgatataaatacaaaatttacaaagatctcatcagaaaatgtatagttactaaaaatttactaaccacaacaatgaggcaggcaaggagaataaagagtactcattgtgttgtaatgtaaatgccttgaatatgtaggtactggaaagtctttattaaaatgaactaagaattggctgggtgcggtggctcacacctataatcccagcagtttgggaggctgaggtgggctgattgcttgagcctaggagttcgagaccagcctgggccacatggtgaaaccctgtctctacaaaaaatacaaaaattaactgggtgtggcgacacatgcttgtagtcccagctacttgggaggctggggtgggaggatcacttgagcccgggaggcagaggttgcagtgagccaagatcacgccactgcactccagcctgggtgacagagtgagaccctgtatcaaaaaaataaaagaaaaaaagaaaaaagaaagagaaactaagaattaatgaaagaggttctttaagaaaatatacaatttattttctcttttcttgcataattatatatttgcttatggttaatttttttacagaataatttaaatcaaattttcttgatccccatcctttgagatctttcatttactgtctgtctatagtgatatctacatatataaaaactgtaattatatgtgaatttgagaagtaacagttttcttctcaactctccaacactgtgtataaaatttaaaatatactctaagtattttcatgtacttaagtgatatattctattattagtaacaaatatagtttttgttatccttcaaatgtgtttaatagttttgaggtaaattaaggaagatataactttttaatattaccttcattttcatattatggaattagagtaggagtatactgttttgaagaaagatgttagaggttattgttgagcatagatcatttcatggcttacatggtttactttttaaaaacttaaggcagtgttagtcaaataacaatactagatttcactgagagtcagaggattgcttaattatacgactgccttgttctttgtcatcaccttgtgtagttttgtaggctttaatcagtaataaaatcagtacttgcctgggcatggtggctcatgctttaatctcaatactttggaaagccaaggcaggaagatctcgagtccaggagttaaagacgctgtctctacaaaaaatacaaaaattagctgggtgtggtgccacatgcctatggttacagccactcgggaggctgaagtgggaggatcacttgagcctaggaggctgcagtgagctgtgattgtgccatttgccattttaatgacaaaacccacaattacttttgcatcaacctagtctcatattttcaagagcctgggattacactcctgtattccaatttcataataactttattgacattagcacatatttctagaacatatttaatttatgtttcattgggtaatatggtgtggtgagttctctctagggattttgctttgtctttgatttacttttccatttaaatttatgaaatttatgtttagatgtgtttactattgattacggctgaggtgaaaaaagggataggcagctgatacccatgaggcacctacctcctgccccaacatgttatacatttctgcacatgttttggtcacagttccattttgcagcctcttatttgattgcttcatgaatctgtttctcagtatcttctttcatttttgtgtctctttatgtttttttttttgtctctccattatatctttaattttcttttttacctgcctccctttcttaattgtccaaaatctagagttgactcttaaagaatgcaggggttagtggctggcttccatctcaaggcagttgaaaaattgtgtataaccttttactccccccagatctaactattaatagcctattgttgagtggaagccttaccaataacataggcagtcagttaacatgtatcttgtattatgcaaaaagtccaaggattttgcatgtgctgatgtagctgcattgacagcttcatgaatttcctctttaattattattattatcattattttttactgttgtccttttgctggattcatttatctcaaagtagtggacatccgcagctgcagacttcagtgtgtggtacttattcagaattcagctttttcttgtaatgtgacttttctgtgcttcttgaaagcacttttagcttcactagtggcacttcatatgggtcacatggtgttactcaagttttatggtattgcactaaacaatgagaaatatgtgagaaccatgatcactttttacaatgataaaatgtactggagagatgaactgctcacatggagatgattagcattacacggcatttcaagcagatacactcaccacaatagcaacccgagatggggttgaaaattttacagttgcatagtatgtactacatttaactttatatagttttgatgtaatactgcatctttatgtttgttttgtgtttttcaaattttattttagattcagggggtacatatgcaggtttgttacctgaatgtattgcatgatgctgaagttttgggtgtgaatgatcctatcacttgggtaatgagcatagtaccccagtacttagtttttcagcccttgtctccttcagccttctgttagcctccattgtctgttgttgccatctttatgtccatgactacccaatgtttatctcccactcataagtgagaacatgtggtacttggttttctgtttttttgttaatttggttaggataatggcctccagctgcatccacattgctgcataggacatgatttcattcttttctgtggctgcatagtattgtatggtgtatatataccacattttctttttccaacccactgttgatgggcacttgtgttgactccatgtctttgttattgtgaatagtgctgcagtgaacatgcaaacgtgtgtcttttcgatagaaatatttgttttcttttggatatatacccaatagtaggattgctgggttgaactgggtagaatggtagttatttgagaaatctctaaagcattccacagtggctgtaataatttacattcccaccaacagtgtctacgtgttaattcccctttctctgtagccttgtgagcatctgttgtttttttttgactttttagtaatagccattttggctagtatgacatggtttctcattgtgattttgatttgcctttctcagattagtgatgttgagcattttttcatgtttgttggctgcttgtttgtcttcttttgagaagtgtctattcatatcttttgcctgctttttaatggtgttatttgttttgtgcttgttgaattttttaagttccttatagattctaatgttagacctttgtcagatacgtagtttctgagtatgttctcctattctgtaggttttctgtttactctattgatagtttcttttcctgtgcagaagctcttcagtttaattaggtcctacttgttaatttatgttttcttgcaattgtttttgagggtttagtcataaattattgttacaggaagtcagggaccccgaacggagggaccagctggagctgcggcagaagaacataaattgtggagatttcattttaatatggacatatgtcagttcccaaaattaatacttttataatttcttatgcctgtctttactgcaatctctgaacataaattgtgaagatttcatggacatttatcagtccccaaataatactcttataatttcttacacctgtcttactttaatctcttaatcctgttatcttcgtaagctgaggatgtacatcacttcgggagcactataattgtatgtaactgtacaaattgattgtaaaacgtgtgtttgaacaatatgaaatcagtgcaccttgaaaaagaacagaataacacgattttcaggaaacaagggaagacaaccataatgtctgactgcctgcggggtcgggcagaatagagccatatttttcttcttgcagagagcctataaatggatgtgcaagtagggaagatatcgctgaattcttttcctagcaaggaatattaataattaagaccctgggaaaggaatgcattcctggggaggggtctataaacggccactctggaagtatctgtcttatgcagttgagataaggactgaaattcaccctggtctcctgccgtaccctcaggcttactaggattgggaaaccccaccctggtaaatttgaggtcagactggttctctgctctcgaaccctgttttctgttgtttaagatgtttatcaagacaatacgtgcacagctgaacatagacccttatcaggagtttttgattttgccctttgccttgtgatctttgctttgccctttgccctgtgatctttattggcctcagaagcatgtgatctttgttatcctttttgccctttgaagcatgtgatctttgtgacctactccctgtttgtacaccccctccccttttgaagtccttaataaaaacctactggttttgtggcccaggtgggcatcacggtcctacagatatgctgtgtcacccctggaggcccagtaaaattcctctctttgtactctttctctttatttctcagactggccgacacttagggaaaataggacttacgttgaaatattgggggtgggttcccccgataaattatttcccaaggctgatgtccagaatggtgttccctaggttttcttctagatttttagagtttgaggtcttacatttaaaaattttaattcatctggagttaatttttgtgtatggtgacagataagggtccagtttctttcttctgcatatggctagccaactatcccgtaatagcagggataatgtgtggctaagtcttttcaccatttattgaataaggagccctttccctattgcttatttttgttgactttgttgaggatcagatggctgtaggtgtgtggctttatttctgcgttctttattttgttggtttatgtatctgtttttgtaccaattatcatgctgttttggttactgtagccttatatatagtatgaattcaggtaatgtgatgcctccagctttgttctttttgcttagaatgctttggctatttgggccattttttggttccatatgaattttagaatagtttttttctagttctgtgaaaactaatgttggtagttgaatagaaatagcattcaatctcttgctttctttgggcagtatggccactttaatgaaattgattcttccaatccatgatcgtggaattttttaaaaattgtttctgtcatttcagatttatttgagcaatgttttgtagttctccttgtagaaatcttttacctccttggttagatgtattcctaggtatatttttttgtgtatgtggctaattgtgggattgtgttcttgatttggctctcagcttgaacgatattgctatatagaaatgctactgatttttgtgtgctgattttttatcttaaaacttttctgaagtcatttatcagttccaggaaccttctggcagagtctttagggttttctagtataggatcacatcatcagtgaagagagatcatttgacttcttcttttccaatttggatgcctttctttctcttgcctgattgctctgggtaggacttccattactatgttgaataggagtgatgagagtgggcatccttgtcttgttcattctcaaggggaatgctttcagtttttacctgttcagtatgatgtttgctgtgggtttgtcatgaatggttcctgttattttgaggtatgttgctttgattcctggtttcttgagtatttttatcatgaagggatgttggattttatcaaaagcttttttcacatttattgagatgatcacatggcttttgtttttgtttttgattctgtttatgtgttcaatcaaatttattaaatttttgatacactgttgagtttggtttgttagtattttgttggggatttttccatctatgttcactagggatattgggctaagttttctgtttctgttgtgtctttgccaggttttggtatcagattgatgctgactctgattttatttacttcaaagtaatttttgatttctgccttaatttcattgtttacccaaaagtcattcaggagcaggtcatttaatttctatgtaactgtgtggttttgagagagctttttgatactgatttctatttgtattccactgtggtccaagagtatggtttgtgtgactttttaaaaaatttattgagacttgcattgtggctgagcatgtgattgatcttggagtatgttctgggtgcagatgagaaagatatatattctgtggttgatgggtagagtatcccgtagatgtttattaagtccaactggacaagtgtcaagtttaagttcaggatttctttgttagttttctgctttgatgatgtgtctaatgctgtcagtggggtgttgaagttccccactattactgtgtggctaagtcttttcataggtatagacatacttgtttataccccaaacttgggcgtgtatatatttaagatagttaagtcttcttgttgaattgaactctttatcattatgtaatacctttatttgttcacttttacttttgttggcttaaagtgtgttttatctaatataagaacagccacccttgcccatttatgttttccatttgcatggtagatcttcctccatccctttatattgaggctttgggtgttattatgtgtgagatgggtctcttgaagacagcagatgtatgaatctttttatccaacttgtgattctgtgccttttaagtggggtgttttgaccatttacattcaacattaatattgataatgtgagattttgatgctatcataaagttgttagttggttgctttgtagtttctattgtgttgtttcctgatagggtctgtgggctatgtacttaagtgtgtttttgggtagaggaggtatctttccttcatttccatgtatagaaatatcttaaggatcccttgtaaaactggtttagtggtaatgaattcccttagcacttgctcgtctgaaaaaggttttatttctcttttgcttatgaagcttagtttggcagaatatgaaattcttagttggaattttttttctttaagaatgcttaaaaaaggcccccagtctctcctggcttgtaatgtttctgatgaaaagtccactgttagcctgatggggttccctttgtacatgatctgacctttttctctagctgtctttaaaatttttttctttagcattgagcttggacagtcttgtgactatatatcctggtgatgttcattttgtgtagtatctcacagatattctctattcttgtatctggatgtctacctctctagcaagattagggaagttttcttgaattattcactcaaatatgtttttcagattgtttactttttctcctttctcaggaatgccagtaattcatagatttggtcattttacataatcctatttttatcaaagactttgttcatttttaaaaattcttttttctttatttttgttgactgtattagttcaaaacactggtcttcaggctctgagattctttcctcaacatggtctcttctgttgctaacacattcaattgtattttgaaattccttaagtgaattttttaatgactgaagctgtcattgatttatttttaaagatatttctctcttatttcctggcttgctttagacgtttgtgtcgattttcaaccttgtcttgaatctcattgagcttccttgcaatccatgctttgaattctttctgtcatttatgagtttccattttagttggggaccattgcttgacagctctaaggccatcccttggtagtgtcactacattgagatttttcatggtgccagaattcttgtactggttccttctcatctgaagacactggtacttctaatttttgtcattattttctcgcaggtatgattgtttttctttcttcatttccctatagtgttattttattttttctgtaccctcctccccccctttctctatgggtgagactgcagagaattctggttagggtcttttggctttgcttctatagccctatgcacttctttgggcaagttttatattgggctgtgcaatttaatgtacaagccagtagatgacgctaggcagccaatgcagttgggtatatacttgattcttgtttattttcggaagctctctgttgtgtcaggcagtgtactgattctttgaatgcacagtggtcgagctccctgcttaactaccataggacagaggccatgaaggcagggatagaccagcacatctgcccacacgtcccctgatggcaggcacttaaatttctctcaactgtgaatggcaccatgtatggtctgtaagtgtttgtatatgtaagtttttataaattataatttttaatgacagatttgtatatattttatggcagtaaattataacagactagtagctacatatatttcgtgcattcatgatataattttttcttaatttttttgatatttctaggccacatggttggcatgtttttcatgttatcacagatcttcaaaaaattttccaatacagtttttaaaaaaaatccacatataattggacccatttatttcaaactcatgttgttcaagggtcagctgtagttctgaaaagtgatattcattatgtgttgttttttatttgctgttttactttccctttcagtttctcagattagtctgcttttcggttgtatgacttttagttgatttttaaattgacaggatagtaggctgtcctactatctaggatactgtcctactatataggatcctactatactaatgagagaaactgtgttctttcattgtactttatatgcccagggcctggtactagcccttaataaataagcattgaatgactctatgaattaaacttagtgctccatgatttttttttaaaggagaagtgaattgtctgtggcactgtaattggagaatttgatttaaagttacaaattttggtagaaaactttaagttatataccatagctgattaattgaagtcttactttttttcaccacatttaatgagtagatcctggggaccagatacaaactagtttttttcactataattactacttatgaaatagaagtgtagttgctaatatgcacacctcaaaatatgacctatcatacatctattgaaaactagtttcctagtttttactgcctttttctatcaaatagaaaaaaaaatggaaaaaccatttaatggaaagccattgagtgaatttaagattattgttggccttggaaaaattcagttcctctgtgaaatttcttgagcttcttcaaaaatattctatgtaaataccatattggggatattattgatactgtaaaatctttttagactttaaagctttattccataaactggcttgtgatttaattaatatattgttcttttaacattattcgttagattgtttcaaagtatttcaattaattcaatatgttgcaatgttaaaataataactataccattttattaggattctttattcagttcctttttccctgtattaaatctttacattttctagattaacaatttattttatcagtaatacttccattaagcacataatagacttcaattttctacatacaaacatttttattcctaataagtgatgaacaggctcagtaaaagttgctaagaatgtttgtattgctggattggaatatcatggatatgcatactttttttttccataggagagagctttaattgttactaaagtcaggaaaattcagtcacttttgcactttgagaagctgatctctgacatgtttatgaaaactgcttaatcttttaataggtgacaaattttttgaagacagcatcatgacgcttctaccttgatacctgcaaaaatgatgtgaaaaggagcaattttcattttgctctttatatcttcagttctggtgtgaagtagaatggcaattttggattgaaagcttatcttaatttttctacccatctgtctagttggcatttagatattctaagtaaggctccatttcttcatagagattctttaatcgatgttactgtagctttctttctttactttccagggacctcagatcttattttcaaagctcaagtatttgcaggggtgattctggtatgttcacataatttttgactcattcagtcttataaatttgacctgggattcaaaatgcttattgatctttattttatactatttaaaatcaagactttctgcataaactataccagaaccttaaattaagtacttaaggaatttccctagaaaatttacatatatatatatatatacacacacattttttttttcctgtttggcctgatgatatgtctcttgctgtgagctgcagtttttccaactcacttctgctgtgacagaccatatcccatttggacaaaaaatagattgagcttaatactaggaaaaagattatgcttaactattactatgaagagaataattgttcatcccagtggcagactgtagtcttgcattaagtgttctgggactaattaatcaggaaacaactattattaaaaaggaaactgctcatcagctgcctgcttgggctattccacagaaagaaactgtagacctggctacttggactccatcttgtagcatcattctttaactgcttatgtcccagttaaaagaggtaatttaaggatttttagcagaccttatttggtagtgataaactttaatattaaattaatattaatggacttgttgagtataaattaacataaaaacaataatattgggttagaatattttggtcaatctggaaggcttcttaacttctaatcttaccacattttaaatcctggaacaagccatgctgcttacatataatcctagtagacagcatttgagtgtgtatgtaaatatatataaacaaacgtgtttgtcatgcaagatgaaaatttaaaaatctaaccattactgaattaagtatatcatattgacatttctgttgacttactagtttatttggcttaactaaagtcttagagaattactatataagagagtattttaacttaacaagagtatgtgcattacgtatgtgttatatgtgttgtttcccaggctgctttgtgtttgtaagatgattattatatctaggatttgaggtgtttcttaatttaccaaacgggaattgattataaactaatgagaattttataattgttcttgatgttgtttttgttaattttacctcttctttttttgatgtttgtcctaatacgtatacaccatcacaagtttattagtttctaaaataagcaagtagttggatgaattaggaaggtttttggcattactttcaatggcaaaaaccgcaattacttttgcaccagcctagtaagaactggaaagctactctcagtgaagactggaattttaacttattcttcttatatccttcccacccttctgtccccaaccaccatttattaatggacacataatacgtatactctgagcatatttttatgaagccaatttgaattgtggcccattggggattaatttattctgtgctattgtagtatttcaaatcagttatagttcaaggtgctaaatcttatacaaatgatgctgcattacagtctaatgtttacaaacttcatggcacgcttagccagggaaaacaatcttgcgaatgttgggggtaattgccttttaataggtagatgcagttctactggcttgtttgtttaaacaaaggaagaaacttattaaatgcccaacttatatgtgatgcatctaatggaaacaagacagtatcttgaacaagaacagtgataaagcctagagccatgggttttattcaagttttgtatctctgggcttatatttttaatagtttgttttaaactttgggtatatggatttgtattaattgctataacttactcaaatattcaccttactggaagtattgttgtgtgtgtatttaacacagtcgttttaagaatcacatattaatttacttttgtgactcattagtggactatattgatttcaaataataatattacagttaacatagaagtctaaaagctgagttacccagcccaagtcaaatagaaaatgtgttttagaactggaaatagaaacgggagttactaataatgtgtctgtgatttctaactctctttttgatgttttccactgaacattacttggagcataatatcatagagaatttttttatattgtgataaaattgcttatcaaagtttccattaataaatagtacttccacagactaaacactaagaggcaacttattggctctccagaggtgaaatttcaaatgctgaggcatggctgcacatatgcagaacttgttttgcttgttggttgtgttgcttaccggtgcttagtgcctgtcttccttggtgtatgtgaggcaatggatgaaagctgtacatcactccaaaatgatgctgaactgattctagtttgacacttgaattaccttctttcctaagataacacgtcttgttcagtttcaatgaggtagtagatattatttccacagatattgtttatggaactcaatgtagaatgattttttaccatataagaggaaaaattatcttgttgctaaattctatccagtttggaccagtacaatggtgtcttaagtcactggataattattgaatgtaaggtccctgtgatggcacattaatgctttgagagaatggttataattaaatcatgatgatgtctttttatcctggatagagatagtctataagaatgcctgtagcagtggagtgtccttgaaatatgagggaaacacatgtcttaccttagtaatcttaatggttctttaaggattctatgatgcttcaggggcactatgatgcttcaggggcactccaagcaatttttaatgagtccttagtctcatgaaaatatggcaggaaaattatacaccaacatttcatcattttaatcctgtgtagtgtctaaattttagaatacagtctgggtgcggtggctcatgcctataatcccagcactttgggaggctgaggcaggtggattacttgaggtcaggagttcaagaccagcctgggcaacatgatgaaaccctgtctctacgaaaatgcaaaaattagccaggtgtggtagtgtgcacctgtaatcccagctgctcaggaggctgaggcaggagaatcgcttgaacctaggaggtggaggttgcagtgagctgagattgtgccacttcactccagcctgggcaacagagtgagactccatctctaaataaataaattaattaagaatacaatataaggtaccaattccatacctctcttcattcaagtcttgatttaatggttagagtacttagtttttgataatctattcttggtttatttacattcagttttaattttactgctgcctgttatttgtcagaaacattacctaggacagatctcaaagtttaatgtgcattcaaaccacctgcggatcttgttaaaatgcaaattcagtagatctgggatagagcttgggattctcatttcgaacaagctatcaggcaatgtcaacactactactagttagggatctcactttgaaccaagggtctagatcatagactgtaaactctagaatgtttctgaaatattttttggattattattagctcagtgaattcatgagattatttctggctcactttagttttaagaaaataaatatgctaaaaatgtacactatatcttactattttctttaaaacagtttttaaaattttctgtaactgtggtttgctttcattgtaatagagagttcatagcttaatttgttattgtaaaaagatggacacatagtataatttaaaacttaaaatagttacagttcactatcaaaagaatattatgtaaataaatataaaatgaactatgaaagtgagctaaagttacttgccttataaggtttaagttattttttcttaatttatgctttatgtaacaactaaatcatctgacatttgtcttttatttgatgtgaaagtaggaagaaaagtcagagaatcaaagaagcagaagatgattcttttgaatgtttttttctcttgggttttggctgtccgctttcatttttgattccggctgcttctttaacttttttcacatgtatagaggcatttaaattttccatttgagcccaagaaacaagaattagattttacttccatgaatcttcattcttatactattaatattcaacacagttaaaaccataatacattttacttcccaggaagaaaagttttgtttcccattccttctctcgggttatatactgagagaagagggctttaatgaaaaagccaaccacattaatttaaaatgttctatcatggagctagtagtttaacacagagtttaaggttcttggaggcccaacctcctttttttttttttttttttaaatggatagagatgtagccagaaagctagaaaggtattgtgacaaacagctctctgggaaaacctggccagtgtttttgctgtggaaatgtagtggcacatactaaaagcattaactcagcctctttattttcactaccttttagtaatcattcccaagaagaaaaagagttaagatgttattcatgatatagttgattactgacatagagataatgatatgaatcttgaacatacaatttactaatctagattgttgactgagagaacattaggttgaatgttaactaatttaatatgttgggttgctttttaaatgacattcatcatttaagacatctctagtattattctaaattatcaagaggatttataaactagcttttaatttcattcctgatatgccttttatgctgcttagttttgtttgagtatccagtgtggattctgggtgttttgtttttttttttttttgagacggagtcttgctctgtcacccaggctggagtgcagtggcgtaagctcggctcactgcaagctccacctcctgggttcacgccattctcctgtctcagcctcccgagtagctgggactacaggcgcccgccaccacgcccggctaatttttttgtatttttagtagagatggggtttcaccgtgttcgccaggatggtctcgatctcctgacttcatgatctgccctccttggcctcccaaagtgctgggattacaggtgtgagccaccgcgcctggctggattcaggttttatagggcatgaagcttatataatttggaggcaacagctctttaaggacaagatcccattgtgggtgtgggtgcaaattttacaaaagtatataatgatgtgaatgtgtttctagggacccttctgggacagaatgaagacaagctaagcttcatcttctgctactatcacaaactgagatgacacttcatatttttttttatcttgaagggtagtccactatatttggaaagagcataggcttatgttacaactgggattcaaaaatgggccttctccatcttctttgctaccgttagagtcttacgtacatctttttcctaggcaacaacagctttcaaaatggtattcacatttccatctttgtttttttacacactccttccctatagcctgttctctacagtgcagctgaagaaccctttttaaaaatgtttcagtgacatattcaggatatagaataaaatccagaatttttaaactattttcagtgttcttcattcattcccaaaatctaagtttctctctgctgtcatttctcttgagcctgaaataatttttttagcacttcttatggttcaggtctgttggtgaaaacttctcttagatttcctttatttgaacattctctattttgcctttattctttattcttgcagggtgttttcactggactactgagttgacagtttttgctttcagcattttgaaaatgttccactgccctctggtcttcatactgcctgatgaaagtttgtgttttttgttgttgtttgtttgttttgtgtgtttttgtttttgagacggagtctcactctgttgcccaggctggagtacagtggcacgatctcggctcactgcaaactctgcatactgggttcaagtgattctcctgccttatcctcctgagtagctgggattacaggcatgtgccaccatgcctggctaatttttgtatttttagtagagacagggtttcgctatattggccaggctggtcttgaactcctgacctcaggtgatctgcctgcctcagcttctcaaagtgctgggattacaggtgtgagccaacacgcccagcctctgatgaaagtttatcatcattccaggattggtttcataggcatgtgacctatgttgttgcataggtacccgtacttagaaagatcctgtgtttcattaaatgttctactattgctatcttgatacgcttaatggcttttgaacaagggccctgtattttcattttgcactgattctgtggtttcttctattttatatatattatacatgaaacaaaccagaaaatcttctctgcctattgggtaagaattgtcttgtatctaggctgcctgtgctagataataaggatcatcaagatttaagtagatttttttttaaacattcgaccaacttccaaaaacagtttttaggaatagaaaataaaatttataataataagaatactcattcatatttcacagacattcatagtttataaggttatttccatatactttctaattttatccttataaaagccctatgagttaggccagtaataattctatccccttttattgatatgcaaatacaggcccaagagaagttatatgaattaatcttaaatcagtcaggtaaccattcttctctgattaaaatctagtttaagattttttttctctagctgagcacggtggcctgtaatcccagcactttgggaggccaaggcaggcggatcacctgaggtctggagtttgagaccagcttggccaacatggtgaaactctgtctctactaaaaatacaaaaattagctggtgtgatagcacacatctgtaatcccagatacttgggaagctgaggcacgagaatcgcttgaaccccggaggtggaggttgcagtgagccgagatcatgccactgcactttagcctgggtgatagagtgagattctgtccaaaaaaaaaaaaaaaaaaaaaattttttttgaaccattatagctaaaaatagtgaatagtgacattttttagcacacttttttcccaaaatgtttcataaatataatttcatttaacctttcagctagccatctgatataagcagtattcattatcagtgtatttcccttttttgaaatgaaaaagatctaaaggtacaaaaaattatttgtatgggttacataagtaatgtaggatctaaagctgtcacccaaatctctaactctaaattgtgtccatttttttaatattgcactatcttttgttgtttagagatgaattcaacaatatacaatatacatttattattagctcaccaatatttttactttgtgtctttagactgcatctgatgtcgtaggaagcactcaacactttattgaatcaacaaataatgaatgtaaaaaatatcttttggcagcatctgatgtcctttggacttttgcttctttattctgttctggaaaatgtactatgaataaaactgctttttctctaatctcaaatgaactgcataatatttccaaaatgccgtatacctgcattttgaattatgagtcaactgataaaaaaatttaaaagacttctgggccaaaagggctatttacatgctaagtaatatgccttgggatgaaaacacattataaatatttatatttaaccaattttctctaaacccttttggaggtcttttgaagatttctttgtttgctccttcctagttcgctttctccctcccttttttcctccctttcttatagggaatgctattctgtaaaagctatattctatcttctgccaaaccctcaaatctaattttggaacaacttctgtaggtaatttaagtacagaagatagatttaatgttcattttacttttgatttatatatgacatctgtttggaaccaaactttctctgtttttagaaacagagaaaaaaaatattttgggatatgtaggccagaggcaaatgatctgacaagttagcccccttgtttctaaaggaaaaattgccacagtttataagagtggtataaaggccaagaagttgaccaagaccaaaggagatcacaaagaaagcatagcatatagtagactttcaagaaagaagtttactgaatgatgaaggaaaatatgtgtctatggtttttatggcctacctagcatataggatatatcttctttttttccgacccactaccaaagaagagttataaaattcctgtcttcagtcgtgttgacctaaaataagatgtactgtggtatgacaataccaacctttatgtgccttattttcagactttgtgcctttagcttaagtagagatattggctaatagctgtaagtcttgctacttttctgttctcagtgtgatgttcaaaattagtgaaatgcagacttttatttctttcctcaaatgtaagtcatttctgtttctgtagttattaaatgctttttgataatatgaaaaaatatacactgcattggcttttaggaacattttcgtcatatatatttcaaactttaattaggacctctaacaacaaccatgttttaaaacaaagtttggcagcagttggctttttgttttctttatagaaattgaaaaggtgctagaagaaggtgctgagtaattttaaccacatgcaatgtagtaatcacctggaaatcacacactttctcaattgtcttattgctactatgaaaaacaggaataaattttagtcattaatacatttattctttttttccagagaaaaattgaagctgaatttaacacattttattgacttgtatatcacatcattcatgacacaatttatattttatttgtgcacatgattaacactttattggaattattactattataaaattgtaagatacaattggatccaaattttttgtggaattaaaataagccaacaataggattatctttaagcatttagaacagaatgggttaaactgtcattattggtcagaacaagcaaataataggatgttttacattttattttgttgctggttttggttggtatagaacattattatatacaaaatactatttgagatgtgtatatcataaactatagcattgggaatcttttggtcatgccgaggtttttcattggaatttgttgtagcatttgctgtaactggatttgacctgtataaccaatagatagtgtaggatgttatcctttaccagtagttttctgtaactattatgtgtacagtctttgtgtctcagcccacatttataatatctgcacatcttaacaggcacctttttgaatgtaaacatttcagagctctcaagaacttaaagacatctaatcttgctattgcatgcttcaggtggtaagcatgtcactttaaaaaataagacagatagccatttaggactgggagaagctgtgaatttctctctgtcatccagtgaataagtggactagaactttcctctgttatttccagtagtgtttggcaaagatatgaagaatatttgcaacaagtgaatttagaatttgtcacaaacttagattctcatgaaatcccccaaaatgtgaggaacaaattagacataacttaatggtctttatactaacagagttttataaaatcggataagtaaaacaaaacagaaacaaacaccttagtctcactgtcttgtctgttatattttattaatgatgcggtttagacatattttccattaatacagtgtatgcctgtgttacttaataattgaagtttcttttaactctgttcatgttggttaaaaccattttttatgtgaagttaaaatttacagatataaagacattccagggatattgggtaaatggttcttctgaaaatttccaaaactttttaaacacccatttcgtacacatataaacaaatgttagttgtaactgccatacgtctagtttattagcaagttcaaaggatttgaactatatttataaataagtttcttctatttagagggaagaaaagttatttgttgaatatcgttgtaattacttgagtgatacagttttgctattttacaatcaatcattgttctcataaagttctgtaggaaatactgcctatttaatacctttacacttgaacaccaccaacaattttgtttcccttcagggcatacagctgtttccagcctactcagtgccatgtcaggacataaaattatcttgacagcaagatttaaattataaatagtcccataatgacattcagcttgggcggtacatttataaaagtagttattaaggaaaatgtaattcaacccattactataactagattctctcacatttctgaagctgtcttttggtagcccgataatatttgcatatgtaagcatttaaactattaaggctatcaagtcaacaagtataaaaacataatatagatattagataaatggtttcctaaaattttccaaaacttttctattacaaatacgtcttaatatatgtctttgccctatgaaaactgataaaatattggggagttgagaccccaagatcttgatattattcaaaaagcatagactggaaatactttatatataatgaaagaagaaaagaactagaagtcgatttatcttataagcaacatcagaatattggatagtgaataacattttatgagcacttttttcctagagtaaatgttgactgtaagttacttggtgttagtgttctgatttttaaatacccaatttaccatcttattagtacatttagatcctatgagaatgtacttttagccaaagtcatatttttctctgaaaaaattatatttattctaaaaaagctttactatttgaataagtgttgctgtgagtctattttatgctgcgtgtgtacctagttatttcagcatctgaaagtagagatacgtaacagaaagtgaatgggaagatcagtcaatcataacaatatgtaatatgggtccatgttgcagagccacacttatcaaagctttagcctgtgttgtggtcatcactgaaaaaatctagagcatagctggtttgaagctggcatggtggagatgttagtgttagattaacagtaacatttaacctctgtgatataaacctctatgaaacctctgtttaacataaacctccgcatgtttatgtgtgtgtgtgtgtgtgtgtgtgtgtgtgtgtgtgtgtgaacattgattttatttctgaagtctgtagtttataaacattattgcattgtgctgcttagtgggccaaaaattacccaagatgattgctgatcccaacttcgatcttctaattcagtttttaatcaaattttctttttttgattttgactccttctcaatagagatatttcttaccgggcttctgccagtttagcaacttcatttctctcttaagcatgtcttagaaacagcctaatgtatttattctttcctttcccaatttctgtctcttaaaaagggatttctgtcaaaggttcagtgttctgagttgttccctatgctacctaatcactttagccacttagctttgaaactgcctgatgaaaaaggaagttgtactggcatatgtaggtcagttcctttgatttctcatttttcttattcccctagatagaatgatgagaaagtttagtatttttagctttcttttaaacagctttatattctgggtggttttaagccaccccaatttctgatattttaaaagaatcctggtgtttattctagataagacacctactatataaaataatattttatgttgatgttcaacaggaaagggacactaatcagtccacctgatttatttagcaaatattattaccttctactgtgtgccaggcactgtacttgccactgaggataacagcaatgaaatatgttatcagaggagctccactgcctagtgaagaagatgatcaagcacactcagacctgtgttggttagtcaatggaattgcttagtaaattatttcgggtccctgcagtacggtctttttgatcttctagtgaatacatccctggtctgagagttagaaggttttcataccatttctttctgctggcatttcatctttcatcatatatttaatacagtataatcttgagtaagccatacatcatttttataaagttagtaatgtctgttacaacatattatgagatctttgggacagaaatgctgagtcaacagaaacattatcctttcaacaaacatgcactgagtacgtatgattgaagcactatgtgttaggctccctgagtgatacagagataagcgagacaattatctaggtctaggagctgacaatgcagtgtattggatggaaacgaggtatgggggaagtgtagaggagggcataacagttaagacatttctttagtgctttcttgtacaaagcaaatgtatgtttaaatgagaatcttattattaactttattctctctaaccctttatctcttcataatgatttgtagttggagattttccaaacctcagtgggcactgtaaactcaaaaattaagttagtttattatcaacttatttaaatagtgttctttagctttgccttcactttcacttgcattgccagagtacttaatcgttattaagagatattttttaaaaattctactatttgtgtcagggttttcaactttgaaaaatatgccaaaccatttcatcgggaaaaaaaaagtcctcaaagaccctcttttcaccagtgttgagtgtgtgtattttatccagtgttgggtgtgtgtattttatccagtgttatctaaatacatggagatatacaattaaatgcaaactatactcttaactctcatgaccataatctattagaagcaaactataaaatcaataaaaatgtatatttgccatattaatctaatgttataaattaggttgtcttccagaaaataaattactgctgacagtgtgaatatgatactgagagctacaacacagatttttttttgagctttcttttaaaaagcactattacagctatgtaaaattaaattaggttctttttctggtgctttttcagtgcttgcaattccttttttaaaaactaggacaattaagattttattgtgtgatgctggtaagcatggagtagaataaagcagggtattgtaaatcattaatctaaaggatagtaatatttattttaatgaaaggcaatagaattatattaggctagctttaaaataatagtggccatcactagtcgtcttcttcactggataagatagttaaaggaagggcatttgtgttttttgaaggcattatatttctacagagttatgaggatctataatatatataacaggctttccctaaccaacaagcccctttctaggtctaaggaaaatccatggcactctttcccaccaagcccagcttctcaagtcttctttactagctcataagataaaccaatggagggccgggcacggtggctgatgcctgtaattccagcacttttggaggctgaggcgggtggatcacgaggtcaggagctcgagcccagcctggcaacatggtgaaaccccgtctctactaagaatacaaaaattagccagacatggtggtgggcacctgtaatcccagctactcaggaggctgaggcaggagaatcgcctcaacccgggaggcggaagttgcagtgagccgagattgtgccattgcactccagccggggtgacaagagcaagactccatctcaaaaaaaaaaaataaaaataaaaataaagataaaccagtggatttagggggaaacaaaggagacacatagagggtataaataaagcagaaaggtatggagagacatgcataggggtctgtttccagccatttccagccaagttagtctataaatactggggaaatgtgtcatgttagcaacatatattactacatttgttactgaattttggtcactagttattagcaaggaacatatgaaactaaagatgcttcttgattttttgatacaaagcatgtaaatttaaaattgtatttcccaataaggcatctctggggaaaatgaattaatttgggctacttcttagcttaaacccttcacagggctgcgtgcagtggctcacccttgttattccagcactttgggaggccgaggcgggcagtttgcttgagctcaggatgagaccagcctgggcaacatgttgaaactccatctctacaaaaaatacagaaattagccgggtgtggtggtacatgcctgtagtcccagaggctcaggtgggaggattgcttgagcccggaggaggcaagatcgcaccactgcactccagcctagatgacagagccagactctgtctgaaaaaaaaaaaaaaattttttttcaaaggccttaccacttcttatagcaccctcatgattttgttttttctgtgagaatagggttccagacctcaaacaatacctagcatgcaatagaccttcattaacattttaatttaattgaacgctaattgcatgaatctgggcacaacatgttggcagtaagtaaatcttttccatttttagtgtattctagggcagagcattcaagactggaagtatgaaagcaagttagaagagcagaaaaatccaaatttcacacaaacctaatagttagagttcagtttaacagacatttattcagtgctcaacatttcccactgttcttggaagtcagtaatatgtagggttgtctaaagccacattgttgaatatgtgtagaatgatgaaagatataagtgatataaaaaataattaaactcatgattaagattttgttttttgttttttaacttggactgcagagacatctcataaagacaagagcatgagtatttcaagttttcttttgaaaactgagtcatagatgttgcatttcaagccaaggtttgatcattctatacttcatggctttttaaaattctagttgctataacaactttgatatttctttattatttttagcacttcagttgccataacaataagatatcctaaaaaatagcaattttcttttataagagaaaattttcttttaattaaaaatgaatgtgaaccaacacttcttacctataatgtgaacccattatttaaaatgggtctgtgctcttctgttttcatacaattttagcagacttttgtaggaaatatcttaaggttcaacttttctctctctgtttttactgtacaaaagttgaagggatacagctgttttgaaccctttctatgagataattctaatttttatgggatttcattgatataaaaatgaaatgatataaaaaatttaatttccagatttgttagtttataaagcaggaaaagatcgtgattaatggatagttgtaagccatgggaaatgtaagaaacgttgaaatttccttttctcctgtgttatttttaagtgtattttcatacctgttgccatactaaaacaggtacctcctcacttatctggaaataactgacagcttaagcctgagctatggcactttactcatagagcagttacctttatttgctctttgagaaaaaattcttataagcttagtttctgatacagaagcctctagaaaataaggacagcaaattagaacaggaaggaggggctatgctgtgtttgctatgcacatagattcataaaatatagagttatgtattatttttaaggtacctaattcttatggaaatcaaacaaatccagcagctacaaaggtatgattgtatcagaagacagtattcgaattgatgttaatagtgatgatcctaggctaccaaatattaaattatgtcagaattcttggtttaagaagacagaggaatagataatacatcttttaagaatttagatgcctaatgtaatagagtaaaacaatttttttttaaaaacttgggatcatttttctttttcttttttaaagaaatagtttcaacttttatttaagattcagggatacacatgcaggtttgtcacatcagaatattgcatgatgctgaggtttggggtatggttgatcccttcacccaggtagtgagcatagtacccatagttttttaagccttactttcctctctccttcctaactctattagttcccagcatctattgttgctatctttatgtccatgagtacccaatatttacttcctacttacaagtgagaacatgggtttttggttttctattcttgcattaatttgcttaggataatagcctctggtcgcatccattctcctgcaaaagatatgatttaattttttatggctgtgtagtatcgcatgttgtctgtgtaccacatttctttgtccagtctgctagcataaaacataatattaaaaatcaattttaaaaagccccccatttatctgggaaatgtaagatccacgtaccttaggttttcgtagactaagccttggtaatttttatgttactttattgctaatcacaggattttcctaaaaaacatggtcaggttcagacaatgatatttcttttcttttctttctttttttctttttgagaaggagtctctcactgtcaccaggctggagtgcaatggcatgatctcagctgactgcaacctctgcctcctgggttcaggcaattctcctgcctcagcctcctgagtagctgggactacaagcgtgcgcctccatgcccagctaatttttgtattttcagtagggacagggtttcaccatgttggccaggatggtcttgatctcttgacctcgtgatccacctgcctcggcctctgaaagtgctagtattacaggcgtgagccactgtgcctggctgatatttcttttctttaatgtactttaaaaaaggaatggtgagggagttggcaattcaatagaaaagagaaagtgttattattaatttccaaaactcagcatgttacctgtggttgcagtttctgaaggaaaaacgattagatagaaatcttactgatggtaaaataatatgcttatcttactatcagtgagctttgaatgaatagccactgtatgctttacatgctttaagttttagttttcataaccaacttttaaaggtaagtattattatctccattttaaagatagaagctgagatacatggagagaaagatatacccaaggcctcatagttaatgagtggtgcagccatcatgccaacccaaatctgtctgactataaagcctacattctttcctctaagtcatagtatctccttgtcttcaaacttaataaatgtttattaaaggtaataacatacctagaggaaaatatgagaagaaaggtcatactgtgtatggttttattttattgctctgcatactgttttgacctattaattttgttttaaacacatattttgtgtttgagactttctcccactaagaaggtggtaaatatacacgtaaattagtatttttgtctccatttttctttatgatcgagaaacatagtggaacctctcaaagtttttgcttacttggcccattgtcttagatctcagctagctagggcagtctcaaagtgttgtataactggcatttgatatgtcttttctcagtgtctcacttgcagctgggctgttgtgtcttgagtacaaacactgagccatgagtcagatatactgattgagtgtgaaagtatgtgcaggctggatatacttactccatccaccagtatctgttcttttagacattttagtagctctcattctttatggcacattgctacaaaggattctggtatgtttctttttaaatatcattatactatataatttcctggcaatgccttaaaattcactcaaataatttagggctctcatttcgtggctttacacagaactcgaacacttgattacatgcaaatgccatctcagccttttcagtctcttcagctataacttacacaggtcttaaatgatacattttaatgagctttgacatgcatgcatgtgtgtaaccacatgtatcaagatacagaatgtttccctcttccctgaaagttccctcatacctcttgccagtcttgactggtacatgtgtgcacatgagcgcatgcgtgtacacatacacacacacacacacacacacacacacacacacacacacacaccctgcctggggcaactagggttctgatttctttcagcaaaaattagtttttcccatttcagaacttcatataaaatcatgcaatgtgtattcttcaatgtatggcttctttcctttagttttaagattcatccatgttatgtgtgtctttagtgttgttccttttcattgctatatttcattgtatggaaatatcacggtttgtttattcattcccctgttgatggatgtgcgtgggctgtttctggttttggctatttcatttttatacatactgctatgaagatttttatgcaagtcttttgtggacaatatgttttcctttctattggaaggaattgatgggagagatagggtagattttcttttaatgtcataagaaaattccaaactgtttgtcaaagttttcaaagttgagccattttacactactaccagcagtgtatggtttcagttgttctatatccctaccaacattgtactgtcagtcttttagttttagccattctagtgggtatatattggtatctcattgtgggtgtatattggtatctcatctattttgccttttcctgatgactgtgggtgctgagcattttttcattttcttaatggttatttgtatatcttcttttgtgaagtgtcttccagttttttcaccattttaattggattatttgtattcatattaacaaattgtaggagtcagttatatattttggatgcaactcctttgttagacatatgttttgctaatactgtctttggcttgctgattttcttaatgatgtcttttgctaagcagaacatttattttaagtatattttattaaacttttttatagttattgcttccagtatcctaataagtctttgtctattttttaagagacacagtcttgctctgtcacctaggctggagtgtgttggcatgaccatagctcactgtagcttagaactctggactgaagcagtcctcctgcctcagcttgcaggtagctgagactacaggtgtgcaccaccacacccagctaaattttgtttttggtacgaacaaggtcttgctatgttgcccaggcttgtcttgaactcctgggctcaagtgatcctcctcgttaggcctcccaaagtgctgggattataagtgtgagccactgcacctgttcatctttgtctatccttaagttatgaagacattcttcttctagaatgttttcctttagaagctatatatttgcagtttcaatttttttttgtttagatctatgatccatatcatttaaatttttctatatattgtgaggacatggtctaagttaatttttccccagaagattattcaaatttttctaataccatttactgagaaaattttcctttttccttgatttgttttagaatttttaattgaaattcagttgaccatataagtgtgggtttatttttagactttcttcttctcactgatcattttgtatattctttatgcaagatcttaactcttttttttattattattatactttaagttttagggtacatgtacacaacgtgcaggtttgttacatatgtatacatgtgccatgttggtgtgctgcacccattaactcgtcatttagcattaggtacatctcctaatgctatccctcccctctcccccgacaccacaaccgtccccggtgtgtgatgttccccttcctgtgtccatgtgttctcattgttcgattcccacctatgagtgaaaacatgcagtgtttgattttttgtccttgctacagttttctgagaatgatggtttccagcttcatccgtgtccctacaaaggacatgaactcatcattttttatggctgcatagtattccatggtgtatatgtgccacattttcttaatctagtctatcattgttggacatttgggttggttccaagtctttgctattttgaatagtgccacaataaccatacatgtgcatgtgtctttatagcagcatgatttataatcctttgggtatatacccagtaatgggatggctgggtcaaatggtatttctagttctacatccctgaggaattgccacactgacttccacaatggttgaactagtttatagtcccaccaacagtgtaaaagtgtcctgtttctccacatcctctccagcacctgttgtttcctgactttttaatgatcgccattctaactggtgtgagatggtatctcattgtggttttgatttgcatttctctgatggccagtcatgatgagcattttttcatgtgttttttggctgcataaatgtcttcttttgagaagtgtctgttcatatccttcacccactttttgatggggttgtttgtttttttcttgtaaatttgtttgagttcattgtagattctagatattagccctttgtcagatgagtaggctgcaaaaattttctcccattttgtaggttgcctgttcactctgatggtagtttcttttgctgtgcagaagctctttagtttaattagatcccgtttgtcaattttggcttttgttgccattgcttttggtgttttagacatgaagtccttgtccatgcctatgcttgagatctcagaatgggcagactgcctcctcaagtgggtccctgacccctgagtagcctaattgggaggcaaccccccagtaggggcagactgaaacctcacacagccaggtactcctctgagacaaaacttccagaggaacgatcaggcagcagcatttgcggttcaacaatatctgctgttctgcagccaccgctgctgatacccaggcaaacagggtctggagtggacctccaggaaactccaacagacctgcagctgagggtcctgactgttagaaggaaaactaacaaacagaaaggacatccacaccaaaaacccatctgtacgtcaccatcatcaaagaccaaaggtagataaaaccacaaagatggggagaaaacagagcagaaaaaccggaaactctaaaaatcagagtgcctctcctcctccaaaggaacgcagctcctcaccagcaacggaacaaaactggacagagaatgactttgatgagttgagagaggaaggcttcagaagatcaaactactccgagctaaaggaggaagttcgaaccaatggcaaagaagttaaaaactttgaaaaaaaattagatgaatggataactagaataaccaatgcagggaagtccttaaaggacctgatggagctgaaaaccatggcacgagagctatgtgacgaatgcacgagcctcagtaaccgattcgatcaactggaagaaagggtatcagcgatggaagacgaaatgaataaaatgaagcgtgaagagaagtttagagaaaaaagaataaaaagaaatgaacaaagcctccaagaaatatgggactatgtgagaagaccaaacctacgtgtaattggtgtacctgaaagtgacggggagaatggaaccaagttggaaaacactctgcaggatattatccaggagaacttccccaatctagcaaggcagaccaacattcaaattcaggaaatacagagaaaaccacaaagatactcctcgagaagagcaactccaagacacataattgtcagatttaccacagtggaaatgaaggaaaaaatgttaagggcagccagagagaaaggtcgggttacccacaaagggaagcccatcagactaacagctgatctctcggcagaaaccctacaagccagaagagagtgggggccaatattcaacattcttaaagaaaagaattttcaacccagaatttcatatccagccaaactaagcttcataagtgaaggagaaataaactcctttacagacaagcaaatgctgagagattttgtcaccaccagacctgccctaaaagagctcctgaaggaagcactaaacatggaaaggaacaaccggtaccagccactgcaaaaacatgccaaattgtaaagaccatcgaggctaggaagaaactgcatcaactaacgagcaagatcttaactcttaaggctttatagtatgtcttgaaatcaggttgtgccagtctttcaactttgttttttgttttttctctttcccaagatcgttttagctctcttagatcctttgtgtttacatatagattttagaattagtagcttgtcagttctacaaaaagctgcttggatttgaattgcaatagcaatgaatctgaagatcaatttgagaaaaattgacgttcttaacaatattgattctcccattgcataaagctagtaggctgggcgcagtggctcacgtctgtaatcccagcactttgggaggctgaggcaggtgatcacttgagttcaggagtttgaggccagcctggtcaacatagtgaaaccccatctgtactaaaaatataaaaattagccaggcatggtggtgggcacctgtaatcccagctacttgggaggctgaggcaggagaatcacttgaacccaggaggcggagtttgcagtgagccgagatcacgccactgcactccagcctgggagacacagcaagactctgtcaaaaaaaacccaaaaaaagtgtgtgtgtgtatatatatatatatatatatatatatatatatgactttttaatttttctcaaatgacattttatagttttcagagtagaggttttatacattttcacctactttctgtttttcaaggctactttaaatgatttattgtttttaaattttgtttcctactgtttcttacaagtatatcgaaatgcaatgatttttatatattgacctgtgttccgacaaaatttattcattaattctagtgggctcttgggaagacattttagtatttcttatgtgcacaattatatcttccttttcttgtatggcttttttttttcttgcctgttaaactggctgggacctctagtacaatgtgtatagatgtgtaagagcagatatccttccttttttcccagtctcgggaagaaagcatttaatatttcaccattaaatatttcaccattaaatattatgctagatgtaggttttcccataaagtgtctttatcaggttgaggaagttttcttttgtagtgccactaaattaacttttcttaaatattcttagttgctaataatttgtctcataatgaaatgaaattgacaacatgaaattgttttctgctcttgagcggtcactaaatcagtagattgtgatatgtttcacttcagagggtttatttgattcttggcacttagaccaagttgctttaatactacagttgatagtacatttaaagtgcattggtactgtattttgcagcatttggcattttttagatgataagtaattaaataatcattgtcaattgctagataggacttttcaaagcactagtgaaatactcagtttagtttagggagatttatagatgactaatactgcccttcatttgaatatattaggaggttaattccccctcccacaattgggaaatgcattttctagctttttcttgtgaagtttgtgtattctgagcttcacatagactgggtgttagtgtttttcagtcctttgatagactcttttagctattttatgtgctttatattaaaattatgttaaacacttatttgttcgacacctattctgtgtctagcaccgcagtgtaggcacttgaaatgcaatggcaaagaaagcagatgttgctctcctcatgggacttgtaatctagtcaagaagacaaaggtgaatgaagtaaataattataaactataatatgtgtagaatctggtctggttccctgtgagaactcaaggaagatttcccagaggaagtggtgttaaaactgagacctaaagattgcatctgaattaaataaaaagaagtgtgatggcctagtaagcagttataaatatcctgaggccgtagggaacatagcaaatatatttgtgactggtgggtgagggatatgagttggtggggaggtagaggtagtttagctaatcctaaacaacatagaagagaagtgagactggatggatgcatagagaccagtttttgtagcacctattaagatcttatcataagggcaatgtaaaaccagtgaagtattttaaaacagaagcaacgcgatctggtttgcattgtggaaaaaaatattttgtctcttttgtgaataatggattgaagagagactacaaacaactcaaggccacattggaagccactacaggtgtctaagcacaagatgatgctggtttgctagggtaatgatagtgaagatggagaaaagttaccaggtaggagaagtagttgaggaaataggtaaattctgaatgcgtaagccttttggtacatttttaaatttattgaaggacaacaggtttactttagtctctatttgtttatttttttatttttattttttgagacagtctcactctgttgctcaggctggagtgcacggtggcgtgatctctgctcactgtaagcaattctcatgcctcagcctcctgagtagctgggattacaggcgtgcaccaccatgcctggctaattttttgtatttttagtagaggcagggcttcaccatattggccaggctggtcttgaactcctgacctcaagttgatctgcccgcctgggccttccaaagtcctgggattacaggtgtgagctaccctgactggtctctatttgtttaccttctttgatactatattgcttgtatagttctctttgataggcattgcctactgtttatcctatttgccattgatggctaatggtcctttctggctttgctgtttaagttctattgaggagtagtttgaattgactggatgttttaataatgaaatattgataaatataaaagaataaaagtattatatatatatataaagaataaaacatatccaatatataaataaaaaattaaatgcctgtgatgtatcatgtaataaagttatacagtttgggctgtttcaagtaattccatataatgattcctcctagatattttctgattagcattcatcagttgaaagcagaaggaggcagctgatgattgtaaaaaaaaatggcaataataagatacctaatgaccccgaaaatgaagcgaattatgcctaatttaaaaacaaagaatgctttatataggaaactatgtaaatatatattagtactcttttgtcagtaaggcttcacattataaatgtgttcatattataatcctatcggaaaaaagtatggtaagaaagaaaagtaaggaagctagcacagtcagccaggtgtggtgtctcacgtctgtaatcccagcactttgggaggctgaggggggtggattacttgaagtcaggagtttgagaccagcctgaccaacatggtgaaaccctgtctctactaaaaatacaaaattagtcaggcgtggtggtgcatgcctgtaatcccagccacttgggaggctgaagcaggagaattgcttgaacctgggaggtgaaggttgcagtgagccgagatcatgctattgcactcctgcctggtcaacaagatcgaaactctgtctcaaaacaaacaaacaaacaaacaaataaaaaacgaacaaaaaaatgaagtagctagtacagtcagttgctaaaaagaaaaaactactttgagctgctgaagctttttttttttttttaaagttggtggaaagaaagagggaggcttagtgggtcaaaggcactgcttctgaaactcttcatctcatgttttcatctccctttagaagcatgtgcaattatcaattatttatagtatttgtagattcaaatagctaccagtgattatttttggaaacaaactaaagggatttagtatgtgaaattttctgaatgatattttttgccattttcctaattttataaatattatgattcaaaactgcttcaaatatgtgtaatggctatactttttcaatggtttggtagtaaagcttagcatttaacttttctttacaaggaatgtgggacctatctacattcacgaatatttatcaaatataattttattttaaatatttatttttcttgtactagagaatatctgattttgtttgattttaatactattatctctgaaagtcaaaatatttccctataaaataggactttctagccttttgtataaaatttaaatattgccttttcatccttaaacatagtattcacttgaaaatcgttattctaatgtatcttacaaacgtctcatttctggtaatgagaaatacactttctgttctatattcacctaaacctccaaagattttggcagtaacatggttttctctgaaaggaagttcaacatggaggaaagaataggaccttctactctttaggaataatttttttccaacttttattttagaatcagggagtagaaatcatttttacaattaataatacataatagttatatatggggtacatgtgatattttgatacatgcatacaatgtgtaatgatcaaatcagggaaattgggacatctgtcatctcaaatgtttatgacttattgtattggtaacattctaacttctcttccagttattttgtaatatacaataaattgttaactataatctccccactacaaccactagaacgtattccttctatttgactgcatttttgtaaccattatccaacttcttttcattcctttttccctacccttcccagcctctggcaactgccattttactcactacttcaataagatcaacttttttatctcccacatatgagtgagagtatgcaacatttgtctttctgtgcctggtttatttcactgaacataatgtcctccagttccaatcatgttgctgcaaatgtaagaatttcattcttttttatagttgaataatattttattgtatatacatattgctttttttccccacctgttcatgtcttgatggacacttaggttgattccgtatcttggttattgtgaatagtgttgtaataacatggtagtgcatttatctgtttgatattgctgatttcctttcttttggatatatacccagcagtgggattgctggatcatatgatagttctatttttaaatttttgaggaacttccatactgttttccataatggctattttagttttacattcccccaatagtgtatgagtgttctgttttctctgcatcctcaccagcgtttgttactttttgtctttttggtaatagccatattaactaggtgagattatatctcattatagttttatagttttgatttgcatttgccagaggcaaaatgagtaatttttcatataactcttggcaatttctatgtcctcctgtgagaaatgtctattcagatcttttgctgactttttaatagtttttttctgattattaatcacttgtcagatggatagtttgcaaatattttcccattttttaggttgcctgttcaccgtgttgattattttctttgctgtgcagaagctttttagcttaatatcatcctgtttgtctatttttgttttgttgcctgtgcttttgaggtcttactcaagtagtctttgccaaaaccaatgtcctgaagcatttcccagtgttttcttgtattagctgcatagtttcaggtcttacctttaagtttttaatcaactttgacttgatttttgtatatggtgagagataggagtctagttttatttttctgcatatggatatccagtttttccagcagcattgatggaagacactgtcttttcaacagtgtattttcttggtgcctttcctgaatttaggttgactataaatgtgtagatttatttctggtttctctgttctattccattggtctatgtgtttttatgccaatatcatgctgttttggttactataactttgtagtgtatttggagtcaggtagagtgatgcctctagctttgttcttttttcttaggattgccttagctattcagggtcttttgtagttccatacaaattttaggttttttttttctatttatttgaatgtcattggtattttgaaagggattacattaaatctgtatgttgctttgggtgatattgtccttttaacaatattaattcttccaatccatgaacatggcatatctttttaatgtgttgtttggtttgctagtattttgttaaggatttttgcatctatgtttctcagggatattggcctcctataattttttttgttgtatgtgtccatgtctgcttttggtatcaagatagtgctggcctcacagaatgagtttggaagtattctctcctcttaactttttaagaatagtttgagtggagttggtattagttcttctttaagtgtttggtagaattcagcagtgaagccatcaagttctgggcatgtctttgatgggagactttttattattgcttcaatctctttactcattattagtctgttcagattttctatttcttcatggttcaatcttggtagattgtatgtgtccaggaatttagccattttttctaggttttccagtttgttggcatatatatttttcacaagtctccaatgatcctttgtatttctgtggagtcaattgtaatgtcttttcatctttgattttatttatttgagtcttctttcttttttgcttagtctagctaagggtttgttgattttgtttatcttttcaaaaaatcaagtttttgttttgttgatctttttatgttttttaggacttttaagaataataataacctatttcggtcccattttcacaagtctgtgattataggcaagttatacttactatctctactatctgctttcttcatttggaaaatgataatgatgatacctacttcatagagttttaagatttttataaaggaaaagtatataatgcacacagcacaatgcttggcatatagaaaatactcaacaaatgttagttatcttccatttttatcttaattttcctggtgtattttaattctgacataatttgtaaattagttctaagtcacttttaagaaaaatgctgatcccctaagaagtttaaaatagtgaatgtttgtctgtagtaagtcaaaataatcagaaatgttttaatgtccatcaaatatttgattaaattaatttgcattgttctaatttaggtatgtgtagctcaagcacttagaacaaatttctttgaccatttgaccttttttttcatattaggataaaaagtggataagcaatgtttttatttattctaatttctatgctcttttgagatcatatttgaccttcagtattgctctgaatagattttggtacagtagtgttagttctattgctttgtttgtacagttaaatacatcaaactcagcaattttttgtgggggtgatggggattggagagattagtaaatgatttctaagttctgttaattaaaatgtaactatatattttagagagaagttagtagtcatatcactttagttcatgaagacttggcaaatttttaataattaataagttttttctgccaatgagcattagattactgctgactttttagtgtcatagtaccttgtggtagtttctttacagggtttacaggagtatggcagtttattttttctgtcttgtccatacgaaataatctttacaaatgctataaggagaataccttgagaagttcataaatgccttaatatattataaagatcggtcagttccattgtcttcttttgtcagtcttgatcggagcttgccgagtaagtctataagcctgcatgtgcctggcaactgttacctagtgacagtttcagctgcagtagccattggctgtgctgttgattggggcaggagggccgagtcacctttctgatggtgagtttttctgcatcagcccaggatgaggaggaggagtagggcttgggctcaggtggagtcattgatgctgagagattgtgaagaatatactgacagcatccttgtagctgcatcacagtaaatcggacttctgaatcaagcagcccagcctagcagctgataagagtgaatgtaggtgagaagcattaccttattcctgtaacaagagaactgttttgtgataagtgaaactaggaatgtagaagaagaaatatcctatggctattataaaagaagaaggacttgcctgaatgacttggtggtgcaccagaaaataactttcagaagaatgctttctgttaagctgctgcattgttcctggaggaaatgttatttctaatgcatgttatttcttcaaaagataggataacaaagaatgacaggagactctctgaaatgacttcacttttaaaaaatactttggcaaatgttaacctgatatcaaaatgaccttggaagcattttggatggattctatcctggcagccttgcaatgtttcaaactctaggatttaaagttcatcttgatactttagaggtattttaaaataagactatcttgcaacctacctaatggcccctgtgttaattgagcacttgctcaaaatagagtacagaaaaatagaagaggcattttttaacatatggctgctacataactgcaaatgtaataaacaaggtaattttccactttcagaagatatagttgaagtaatgatttaatgtgttaaatcatctactgaaaatagaaaaggtatagcaacatagaacatgaagcctattagaaatacctaagtaataaataatggcagcatttctggtcaaataagctcggagtatattggaaagttttattgtctaactttatatttacatatatatgtgagatatgggtatacagttgcaaaggtgagaaataactgtgagctacatattttattatcatgctccattataaggaaggtggtatatgaaataacaaatgttattttaagttatagatgccaaattaatagcaaaaataattcattttgaaaaggaagaggtataagttacgttgctgttagtaccaccagtaactgtaatggattaaaactgctttcatctaaatgctttaaaaatgcatgcagaattaaaacttcagaagtttattacattttgccaggtgttaattcattaattcattgtatattctcttttctattggaaaatacttttttctcatgagagttatagggcaatctggagtctgtttgttacctctattctgcccatgtagagatgaatcttttcaaattaactttgatagagttgtttttcttagattttagaaaaatgagaaataggttataaatttgaccccccaacatcaatccctgaactaagcccaaagacactctttgccacaatgaactttttcttagcttttcaaccaaatttgagatcttaaattatttaaaatctaaaatatgaatgcatttttcatcatagataaagcaggaagcctgagacagtttcagagtttttcttttctcattctttccagttgctccctaagaaactgcctctcttaggagaacagcccacagaagcttttcttcctttggcaattcattttttttctttttacagatttaatttttcatagtgcaagataataagaagtctattttctctagaagtgccttatgtctgcaaaaagttctttgagggcaccagaggaaactaattagtgacctcttttcacctcctttctagcttatccccttctctccaccccttaccgccccccccccacccccccgcccgaaagctgaggtgtgtcactgctgaactgaggctggtgaagagacttgagcactctctgggactctcagctgtgacagaagcactgacactgtctactgaagcaggttctgaaacactcatgtgcggtgtttaacagatgctgggcagggcatctgcttgctgtagccaagtctgcaggtgtctttaaatttccaagccatgaatgaatccaggtggactgaatggaggatcctgaacatgagcagtggcattgtgaatgtgtccgagcgtcactcctgcccacttggatttggccactacagtgtggtggatgtctgcatcttcgagacagtggttattgtgttgctgacatttctgatcattgctgggaatctaacagttatctttgtctttcattgtgctccactgttacatcattatactaccagctatttcattcagacgatggcatatgctgatcttttcgttggagttagctgcttggttcctactctgtcacttctccactactccacaggtgtccacgagtcattgacttgccaggtttttggatatatcatctcagttctaaaaagtgtttctatggcatgtcttgcttgcatcagtgtggatcgttatcttgcaataaccaagcctctttcctacaatcaactggtcaccccttgtcgcttgagaatttgcattattttgatctggatctactcctgcctaattttcttgccttccttttttggctgggggaaacctggttaccatggtgacatttttgaatggtgtgccacgtcttggctcaccagtgcctattttactggctttattgtttgtttactttatgctcctgctgcctttgttgtctgcttcacttacttccacattttcaaaatttgccgtcagcacaccaaagagataaatgaccgaagagcccgattccctagtcatgaggtagattcttccagagagactggacacagccctgaccgtcgctacgccatggttttgtttaggataaccagtgtattttatatgctgtggctcccctatataatttactttcttctagaaagctcccgggtcttggacaatccaactctgtccttcttaacaacctggcttgcaataagtaatagtttttgtaactgtgtaatatacagcctctccaacagcgttttccggctaggcctccgaagactgtctgagacaatgtgcacatcctgtatgtgtgtgaaggatcaggaagcacaagaacccaaacctaggaaacgggctaattcttgctccatttgaagagagctacatagtaaatcaaatgtaatctgacagtggttttggatcatattctagattcatctggaaatttgccatcagagaaatatttacttgaatagttgactgtaaaatgaagtatgagactaaaggtttctctctttttttttctttttcatggaagaaactaaagggaaggatgtatagagggttagctcatgaaataattatagcatgtgagtattagtgtgcagtaataggaaaaattaagcactgagatgaaaaagaatatctcaaatcttctgcaggacatgagcaagccccttggctcagcatttctgtctttctgtctgactgtaccctgcctctgtctttctcattttgtctatgtttctctcactctttgtggaagttattacttacataaactgccctttgtagaaaagtgctacatattatatatgtggtaaagtataatcttttgcatcaaagtgtacctttaatcacactaatctataatccataagtgatctcttcatggaggatgcacagtaagcattgcattttattatttgccaaacaacccctttgcttgtgtttttataatgttctctgcagcacagtttttctgctataaacaaatagaaacagtatttttgtttcttctgggtaaaatgacatttgcttttccctggtttcctaacagtctcctgttttttttctctctttttcttgatctgcatccattggtaccttactttagaagtgtcttagctattgaaagaatctactgtatagagcatccatgatgttaaataatgtatttcttccagcaaagcaatctggtagcttattaaatatttttaatggcttttggaaacatttttatctggttccttttaaattagttcatgtgcttaaaagtgatgtcttttttttgctatagtaaagctttgtttttctttaagaaaacccactagtaattgtaatgcagatgcaggatactcacccagcagtgaggtattactcttaagggtacttagaatgccctttttaaaaataaataaataaaataaaacatgaatcttttttgtgttaggtctacgatagcttactgttgtgtccactagtcagtcatttgtgtgatatgcgtttgcacatactatgtttttcacagcaaagaaaatgtaaattatgttatctgtgcctaacgttttcttagcaaaatatatagatcaatgttgtttaagttgtcaacattggaaaaagtatatacaaaaacctattttaagagaaaaatacttttgtgtaattgttatttagatatttatattagacaaagctgcatttttagtgccgctgagaatataatatacttaattatcaaatacaggtaagagctgacagtattttcttttgtaatgatctgttttcaaatgcagagattaacttatttttttgcctgctacatggggttgtgtgataaattgtcaggggtttagatgtagcaaagtagcatttggggaattagcgaagcaagtatgagcagtaaaacatctaagtattacttttttaccataagtttcttgcctgaaagatattttaaaatttatatcaaactactgagtatttttcttctcagcatttttgatttctttgttttatgaaatgcatttaataaaatgtgcctatgactcttcaaattagaagccaaccatgtttgcaccctggtggtttggcttcaaaggtcttttagtagaaatgttgtcattttattgaggttgttctgaacccctgtatatttttaaacatgtaagaaagatttaaaataaagaataaaataatattctatatatcaaaatgagactttgcctcagtttaataaaacacttaggacaagagtttacttttttgggaatcaaaatctgattgttttatacttctgtagcttgggtttatatttattcttgtcccctgtttgccagtggcatcttggtttaaatgtgccttttaaattcagaccagttcaaggaaaacaaagttcaaggaagtgtactgctaacatttcagatatcacatataagacttctaaattatacatattatttgggaatcgtatttttatttctttaaggtataaatatagttagaaaggacccagtggattctgtgtacagaaagcctgaggccatgcttactgcattttccccttctggcttttccccatagtaattaataacaattatatgccaggctcactgttcacttttacatgtgttataccttaaatcctcactacagccttttgagataatagttattatttccactccagagataaggaaacgaaagaaaaatgattattcgtcagttaactagtcaatggcagaggttcccgcccatccagtaggcctgggccaaagcctgcctgcttcaccggtaggctgcgctgctttcatttcaaaagcctttaaatttttgtacctctgtctgtaccttttccctacaatatttctctgagttttatttatttttttctcatcgtaagtcttttgcttgagttcttttcttgtcttgtgatatctttttctttgatcttaaaagtttcttttattaaaacagcaatctgataagctcaaacttaccagtttagtctataatcaaactgaaattgttgatattactttggtttacttttgttatttcccttgaatacctttttgaaatctctatcaatttctttttggaaaaaaattgttttgaagaggaagagtgaaaagaaaggctttatcataggctgaaagaggctgaatgaggcaaattctgagtttatttatttactatagtattttatatacaactctaggacaaaccacttaacttccttttatcatattttaatgtgtttgtataataagctaatccttattttgaaacctctctttttaggtaatgtgttttaagaataggaagcataaccatttttctcatcattatattgtattttgtggtaattatccagtttggctataaaagacagccaaaaaacaatgcattctgtattctttttcctaagggttctattatttgcatagttgtttctagagttatagagtgttggaaagcttcataattgacactattagtatatgaaacttgggctgagatccaggccctcataaactgcttggccttgggtaagataccaaatgctccaaaaccttagttttggcattgattaaaaaatcttaagtcagagacttgtagctctctgtttagctgaatttgaggactaaatgaaattttgtagtctgtgtgcccagcatagctcctggcacataaaaagtgttcagaatatggtagctgctgtttttgttttgttttttgtttgtttgtttgttttgaagtggagtcttgctctgttgcccaggctggagtgcagtggcactatctcggctcactgcaagctccacatcctgggttcatgtcattctcctgcctcagcctcccaagtagctgggactacaggcagctgccaccacgcccagctaattttttgtatttttagtagagccggggtttcgcggcgttagtcaggatggtcttgatctcctgacctcgtgatctgcctgccttggcctcctgaagtgctgggattacaggtgtgagccactgcacccagccggtagctgctgttttgttatctttgtgggtgccatatttattaacatcacaacttaaaggtcactaatcccaattcaaacaggaataaaccattgagcattagggttttctaagatagcatttctttttgcaaatctatttaaattcaaattttggggttaaactcagatatttcaagtatatttctgaaagctcgtttcccaggaatagttattcatgaagacatcgtttgagattaaagatatccagcaagcggatgttgtgatgagacaggcatgattctgaggttaacctacctcttactttattacactaaatatgcttaaacattttattctcgttagggaagtaataataggaaggattgtccagggatgtcttgtcatttgtctttgcactttaattttcctcatttattaaaatgggatttgaagtattttgtcatatatctatttcttgggagaaacaatgattaataagctgatttgctccatagataacataaattatgtgaatttaaagataaatgaagttgccttaaaggacctttcctctttttctccccacgctagaaggtaatcattagatgtgaaaaagatacaattacataataagtagataaaaaagatttagatgtgagaaatctgctggtataacattctgagcatagatagcatcatgtatgtgtaggtagggccattttggtgcataggagcatgtatgtgttactcagtcagtgctgtactctgacgtgtaggttccaaaagatgctcttttccttgagcagaaattaactttattttagattgagtgatatgtagaaagtggtaatcctgtaaccaaatacatagatattgaggaaaacaaaattgctagagtagagaaaacagttcctattttatgatttctcataaatggaagtttgattcagtgctagtcttgctctgtattttaaaatattcataacttttttcaatagtaaaagtgtttttttaaaatattaacatgatgtcattaaggtttttcttcatgactattttgttttaattttttacaatgagcattggtaaaaatttcttttataatcagaaaaattaatatttggttaaaaagaatgctgaaggctgggcgcggtggctcacacccgtaatcccagcactttgggaggccgaggcgggcagatcacgaagtcaggagatcaaagccatcccggccaaaatggtgaaatcccatctctactaaaaatacaaaaattagctgggtatggtgacatgcacctgtagtcccagccactcgggaggctgaggcaggagaattgcttgaacccgggaggcggaggttgcagtgagccgagatcgcaccactgcactccagcctggcaacagagtgaggctccatttcaaaaaaaaagaagaagaatgcggaatatttaaaaaatattttaacatttcacaaaacagcttatgttgatagtacaaataacactatccaataatgtctcaatattgtcttataaagataggttatatagtttttctgagttctgtaatttttatttcaggtagatttttacaataaacttgacaaccttctacttgcaatagtagatgttcttgacttatttttgctttaatgtaaacagtttgaggtattacttgatgaatctgaaatggatctcaatcactgtaggattttttttttttttttttagacagagtctcgctctgttgcccaggctggagggcagtggcgctatctctgctcactgcaagctcgcctcccgggttcacgccattctcctgtctcagcctcccgagtagctgagactacaggcgcccaccagcactcccagctaattttttgtgtttttagtagagactgggttccaccttgttagtcaggatggtctcgatctcctgacctcctcgtgttctacccgcctcagccctccaaagtgctgggatgacaggcatgagcgaccgccccggcccactgtaggatttttaaatgcatcattcatggcacctttctgcatttttcacacctttaaacaacaaaaagatggctctgcgttaggaaataggctccagctggtacattacctgcatttcctacataggcagaattctccaaagaacatatttataattttttaatggtaacttttattctgcttttatatatgactttctccaaaggtgaagaaaataacagtaataaatttagcaggagtctgttatgtctgataaatatttaacatgaaaggcacatatcaccaccttcattatagtaaatggagccaaattagtttttgagattctaaaattctaaggtttaaggtgataaatatcaagaaacgtagtacataatagtagaattcatgaatgaaaataatttgcaaaaatttgaaaacttccaaaaaggatattttatacaaaagaaatacctatcattgacttaaacatttgaccccagttttattttattttctacttaagcaattgtaaataaggttgatgccagttaaaaatggcaaaatatatattataaattcaattattttaattgcaaggcacaaacaaggtacagagttgtatgacctgttctttaaatttttaaatttatttttgaataaaatgtggactgtagcaagagatgtgcagtaattttgtctgagattatacatgacacaaagaatgtttatgtacatactctgtaaagtatagctttaagatgtttacttatgttcttaatagagttctaagtttaatataattattagtagatggcgtatttttatagaaataacatcttcacaattattcatttactttttcaggaattttataattaaaaatgctaaattggtaagaaattattggaaaacactgcaagttgaaatttggaaacacttataacgcttttgaacatatataatgctcttgacattataaacgaggtctattctaaaagcttctgtgagtaaacactatctcatttcacatataggaatctgagataagatttttaagtgaccctaacaagatcatgtcgtttgacaaagatactactgacgacgtgtcttgtgtgacaataatattgcctgtgataaagttcttgaataatgtatttatagatggctggtaatagagtgacctgatatttctttcttgagaagaaaatgaagacttagttatttgatatagaagaaattctatgtgaatttttttcttttaatttgtgacataggaaaaattattttaaaattaactttatgttggaggtgtgatttttgagatcatagaaatttttaatcagatgtattatcaggcttgatcagtgttttaatatttcttttaacagttttttatccatagagggtaataaaaaatttacctctccttttgaaaacacagcagtcatctactgaatatattgagatatgtagaataaattgaaacagtgtttgctgtgtattctaaacactataaccttaatgatgaagacatcaaaatcacgttatattcaagtacctacttttggaaagtactaattttatagtcatatactttatgttttgaatttttttttgtaatagatttgcaatgttgttgagtcatcatcggttggatttttctcagtcattatgatggacaagattttgatgtttcaggctatagtgcttttgtatgtttgtaatctataaattatcagtcagggaatcagtgattagtttgaattagtgataaataaaaccttttaaataagtaattcagttttatttcaatgaaataaatatagttacagaaaaattaaaggaactcaaattaggcaaacacaaaattgccttgtaagtgtccttagaggaaatctttctttaagtcgtttctagtgtctgtatcagttgaataaaaatgagttccactgagttatttgaaaagtttattctcttaaatatgtaaaatttccataacaatttatgctacttatttaaacagtttgtaggatgaatcattgcaaagtccaaatttggatttaatctgaattaaccagatatttttgcatttcaaatctataaattaggtcaataaatatttattgactatgctatgttaagggcataaattgtggttctataatagtcctggactcttaagagtaactcattgaattgtgtgaatccaataagcaggaaaattaatttctagaatttgagggagagattgcagaaaagtcataggaactatgcaatacattgtagcgttagagggattaacgcattttagaatatgaattggcttcaatatttagccatgtgtttggatgctatagttctaaaggataccacaggatatttgagaagtttttgaagtgaaaggagagaaaatgttcaatgttcagattagtacaaaagtgttgtggggagaatacacaataactttggaatgcagtgtaagtaaaagaaaatattctttatgtggattatatctgattagagtaaaatcatcattttaggtataaattataagctttgagattaggacaataatattaacatgggtagaagtagcttgagggattgcacataggacatgttctaccaactcaggcatcatcttttttttttttttttttttttgagatggagtcttgctttgtcacccaggctggagagtgatcaccagtgtcacccaggcagtggagtgatcttggctcactgcaatgtcctcctcccaggttcaagtgattctcctgcctcagcctcccaagtagctgggactacaggtgtgtgccaccacgcctagctaatttttgtatttgtagtagagacagggtttgaccatgttggccaggctggtctcaaactcctgaactcaagtgatccacctgccctggtcttccagtgatgggactacaggtgtgagccaccatgcctggctttaggcatcttcttagaccactttttctagagttgttttcctaatatttgtcttgtgattacaagtgaatgtcactatatgcaggttattatgacaggcaggttttaacttctctgtcaatcaagttaatcatatgatgtaggcctaatattttgaataatagaatcactcattctttcatttaagtatttatcaggttgctattgtgtgccagggactattcttaattctgtgtaagataaggagatttctaagtaaaacagattttcagttctccaagagcacttagactacaaggggctatatggactttatatggataactatagggcaagataggagctgacaaattacagtccgctgactattgtagatacaattttactggaccatagcagcactcattcatttatatattacccatgggtgcttttgtgctacaatggtagagagtagttgtcatggaaatgttatgttctacaaagcctaaatatttactttacagaaaaaaatttttcagaaaaaaatttacagaaaaaaaatttttttctgtacagaaaaaaatttgctgatgcctggtatgagacattataatgccctttgtatgctactcacagtagaatgttgtgcttttatgtttgctaaaggatctcatacgaaggagtgatttcaacctgattcagtcaggcatcaggaaaatttctagcatatgaataaaaacctagatattgattcccctgtatgattccagtggtttttcagctatatacctgtctgtaaatgaaacacagatctactttttctaattagttcttactattatatagctaatctacattacttatatttagatttttcctactcaggtaaagttctttgcatatcaaacttagtgtctagtttctttatttaactactaatataacataatcgtattttacctttaagcatggagtcagtaataattaacattggatgtagtcttcaaacttcagaagcatttattaaacttctcatcaataaatgataatctcatagtctaaaagagttaatttacttataagtaagcatgcctcttttgtagtactccaataggccgtaaaacaaaaaactaaaaaacagaagatatagctgtataagagttaaatttacatgcaactctaaaacatatatgacttaagagaatttataattcaacaccaatgtatgacattattaataggctcttggtaatatataagttagaaaataaatggttatagtcgtacacttagctaagatgtattgcagtgctaggagttttatgttttttgtcattgtcaactaatgaatgaaaatacaaagcaattttaaagagccacaatttatatttacacaaaattaagccattttaaaaatcttgatgattcagttaatcagaggtatttgatacattatttaataatatttgctttggcagtactattgttttaaactattaataatccattgggaagttttggttttcttcaagtttagtaaatcagtaagaaaatgaataaatgatcttgatgtttttcttgaaaatacagttcacggagtctgttagaataaaaggaaacacttacacagttgtccctcattatctgtgtgggattggttccgggatgccccaaggataccaaaatccacagatgcttaagtcccttttatataatcacatacaataacctacacacacccttccatatactttaaattatctctgagttacttacaatatctaatacaatgtaaatgcaatataattagttgtattgtttagggaatagtgacaagaaatgtacaaatacatttcaagtacatgtacaagtctgtatgtgttgaacacagatgcgaccatccatttttttcccctgaatattttcaagcagtggttggttgaatcgatggatgtgaaccctatgaatatggaggactgactgtatatgcttttatgctttcagtactgtttaaagtcactgagatagtagagccatcattagaacccatatagtcagagtgaataccttaataatgtttattgtatgttttcccaaacaaatgaatagaaaaattttatgtaaaattgtgtattaaaagattgtaaatggtcaggtttccattagtttgattttgagagaaagatttcagagaatcattaggtccttctgcctttttcagaccagtcaacggactgaagggtcttaagaaaagacctcagggatttcttatagagataatttgagtgacaaggtatattgtttccacgtttttatatacccaccagcttgcccttccataattggcaccttttaatttctgacaatgttgtaaaaggatgagttatagcaaatcattattaacttatctcaaatgtttctaattctcatccctttcacataattaacttcctttttttcctcctcattcatttagttatttttatttttaattgtcaaagaaatagttgctcataaaggaaatttaggaaatgtttaaaatgataaaaaagagactaaattacgcatagttctctacccaaatataattaggtgtgatgataatgactgttgattttggttttcttttcttccatttcccccctatggattagggctttttctaaaggatttttaaatatgggtatttataacttaaacatttttccatattattgcatattgtttatgaacatttttataaataaggcttttccacatttagtattattttcttacaatttttaaggaagaaatactgaagcaaacagtgtgaaggtattttaagattatttatgtatattgccaaattggtttcccaaaggagtgatccagtttatcttcacactaataatgtatcaaactatgatgattcattgcaaacttgctagcatcaattctacattaataaataaattaaaggaatttgattttttacttatttcttcctagcccctatagggaatttgtttagttctttgcaattttttttcttccctacactaaaacagatagatagataggtaggtaggtgggtaggtaggcagatggatggatggatggatggatgaattaggatggatctgctgagcctcatttaaaccaaattgtctcaaattctttatttcagaagtctttaagctcagataatcttctcactattgttatctcacaatttactctgtgctactgctgctttgttgtttaagaacactgaattctgtcagtgctgttctcccattattactgctatcttcagcattgtctgtttcattgtatcttgtgtgtgccacacagccacctagatattgcgtttgagaaaggtttcgaaatttttttctattgtattcttctgcctttgttgcagtgataatctctactggcctttcaaggtaggggaggatatgttcctaagcagaaaattttgaggcctgtgtccttgaagagtttgtgaacatcaagatttcagtagttaagcactgaccccaggcctggtattgatacttaggatttccctaacctgcagaaccatgggaatagtatccatagtggtagagctgtggtaagcaaatcagcttttacgttagaaaagtcacacctggtgtgattgtctaacaagcaagcatgcttgcaggtctgtactgtttctcttctttatgtcttttacatctctctggttcctcagagtgctttgtatatagtggctactcaattatttgttgagccaagtacagagtgctctctgtatagtaagtcatctatttcttgagccgaattgaatttaattgtcagagttaacagtagttcttgggtctcttccagtagttctttcacctccagctcacttgagggtatggttggactgaagattacttcaagattattttccccagtgccttgctgttaccaactggggaagctgtggaaaagaatattttaggagagttgaacgatgatttaatatacctatcatttaatatagcttcccactttaattgaatttttccttccaaaattgacattcagtggacttataggctctttttgaatatgcgtcttaaaggggggtgaatacactttggggtagctcaggttttttccataatgtttatttatattcagctgaaatgaatatatttttggcttattcccattgtgattatataggaagaatgagaatttttgttttacccaagaaccttctgtataccttagtaaaagcattgtttctgtccaggcttctcttggtcttgaaccattcttgtaaaatatggttttgaagctcatcaccaacttttccctgactatgctctaataatacttcttttaatggtgctcagggctgaataaaatgttacgtgtgtgatatgactagtaacagatgagagcgagactatcattttcccttggtttataaactattctgctatttattcaggccagaaataaattacatattttggtagttatagtttatcctttaatatatcaagtttgttttcaataaatctatacatctgttttacacctgcttaatttatattccttctccatatatgtacaatggtttttttaaacaaattttacattgttatctcccttcaacttcatcttgttagagttggctcagtttttccagcatttctgaaacctttgttccatttctaatacagtcattaaacttttgacttctgcaaatgtgatatacattttttttcaacttttattgtaggttcaggggctatatgtgcaagtttattacttggggaaatttcaagacactgagctttggggtaggaatgatctcatcaccgaggtagtgagcatagtacccaataggtagtttttcaaccctcatccccttccctccttcctctagtggtccccagtgtctgttgttccaatctttatattcacatgtaccaatgtttagctctctcttataagtgaaaacatgtgatgtttggttttctgctcctgagttaatttgcttaggataatggcctctacctacatctgagaacaggaacagatgcttctcaaaaattctcaaaagaagacatttgtgcagccaaaaaacacatgaaaaaatactcaccatcactggccatcagagaaatgcaaatcaaaaccacaatgagataccatctcacaccagttagaatggcaatcattaaaaagtcaggaaacaataggtgctggagaggatatggagaaacaggaacacttttacactgttggtgggactgtaaactagttcaaccattgtggaagtcagtgtggcgattcctcagggatctagaactagaaataccatttgacccagccatcccattactgggtatatacccaaaggactataaatcatgctgctataaagacacgtgcacacgtatgtttattgcggcactattcacaatagcaaagacttggaactaacccaaatgtccaacaatgatagactggattaagaaaatgtggcacatatacaccatggaatactatgcagccataaaaaatgatgagttcatgtcctttatagggacatggatgaaattggaaatcatcattctcagtaaactatcgcaaaaacaaaaaaccaaacaccgcatgttctcactcataggtgggaatcgaacaatgagatcacatggacacaggaaggggaacatcacactctggggactgttgtggggtgggggagggggaagggatagcattaggagatatacctaatgctaaatgacgagttaatgggtgcagcacaccaacatggcacatgtatacatatgtaactaacctgtacattgtgcacatgtaccctaaaacttaaagtataataataataaaataaaaaagaagacatatgtgtggccaacaaagatatgaaaaaaataactcaacatcacttagcattagagaagtgcaaatcaaaaccacaatgagataccatctcacaccagtcagagtggctattactaaaaagtaaaaaaaataataataataacagatgttggtgaggttgcagagaaaagggaacacttatatactgtaagtgcttattttataacatctaatttgatataatccagatatttggatttttcagatgagaataatttattttctaagcttatactacatattggattacaaattttttaaaggctttctgtttacccatttaggaaccaaagtataatttaatatatgattatttgatagcatttactatgagaaatgttaccatttgtgttccataactacacttaaaatatggaaatattttaatacagatacctttagcatttgggacatatcttgcagagagattttcaagaatgccttttagtggagatttgtgaaatgaaagatagtaaacctttggggtttattgcagttctgcccaaggacaaatgaatgaatggatgacttttcaaagtaatccttacaaagttataatttgtgatgctttccccatccttaattaattgttctctttaactactttcacagaaagcccatctactctcaggaattaaactatcatccttttgccaagtattccaaaatagaactcttcaaatctggccttgtaccttttctccaggagcatatactatgctgccttcaatgagccttcttattctggggttttcataaaaattgaaacctgaacaatttcaaaggaaaatcattattaccatttcttattccttacactgctcatctctttttttgttgttgttttgttaatgtcattagtaccactgccttcttatatttccactttatagccctgtctgtttaataaatgttaattgaaaaaaagactacctggattttttttcttctaccttaatcactctttcatttagaatccagtttatacacttcattcttcactgtcttttaagattctttctctgggtaaccagatcacttttttttttgcttcttccatagaaagattaccttctttttttgaatctttatgtatagttttattatattctctatgtgctttgaatgataggaactttaggttaactgataacttatggatacagcctcctaccatggctaaaattcctttcataactagcaaggtagtctcttcaattattataaagttctgtgacttagaaaatacttcctaattaatgagccccaaaatcttcctattgatcctattgacataggatcaaatgtccaccatttgatcccatgtcatatctctgtggaaacacagaaataagtctccctttatgatgtagcttttctggcacatgaaaactactgttatatctgccttctcttctcagattaaacatctttatttctttaacacattgctaattcattcattcagcgaatatttattgagcattttttttgaggcggagtctcgctctgtcacccaggctggagtgcaatggtgtgatctcagctcactgtgacctccgcctcccgggtttgagcaattctcctgcctcagcctccagagtagctgggactactggtgtgtgccaccatgcccggctaatttttgtacttttagtaggctctgggtttcaccacattggccaggctggtttcgaactgctgacctcaggcgatccacccacttcggcctcccaaagtgctgggattacaggcatgagccaccatgcccggcctattgagcgtcttttgtgtgcaagtcattgtttaggtatttggaatctggtgaacaggaatgataaactcttttctcatagagcttacatccaaatagagataaaaagtattctatattaagatgccagcaagtaaaaaaaaataagataatttcagattatgattaatgccatgaaaagaatagaacaggacatcaggatggagaagtgatagagatgggaggcagcttctccatgaactttggtttacaaatatctcatcattttggttgccttccaccacaacaacatgcatggacttggcacttttaacatatgatcttatggtgaaagacttctgatctgctaatgtcctctgtgtacatagggaagtatggagcttcttagttatgtgggagatgaagctgtctgaactacatcagtgagggaactattaaagaaggagacacaaaaatttagaccttttgcagttatcgttagccgcagtattctcttgctcagtgtgctcttcttacagtgggatgagtagttgccatatttggacaatgtgcttcccttagtgcagctccacatgtaatcagctgttccaacaacaggtcaccttagctttgtagtgaacttatttaggtctagatctcacctgtttggaacttggaaaatcagtttattgaacatagttgcagggctttgcagttattccttacttactcagcacttccttctactttaatgtgatctttttctaatgtttttaatagatttagaaagcttatgttccttgttgtctttaaagttagcaaaaatgatgtatacagaagagtacctaggcaaaacttagtaaaaagctttcttctaaattgatttttctttatttaattagcacattttgagtaaggccataggtctacctcaaactgtacctgaacctgttaatatctagttcccattttttccccttttgtttcaaatattttataaaatgtttgctaaagacagtgaagcataggctgggcatggtggctcacgcctgtaatcccagcactttgggaggctgaggcgggtggatcacttgaggtcaggagtttgagaccagcctgggcaacatggtgaaaccctgtctctactaaaaatacaaaaactagccaggcgtggtggcacacccttgtaatcccagctactcaggaggctgaggtaggagaattgctttaatctggaaggcggaggctacaatgagccaagatcacgccactgcactctagtctgggcgagagagcgagactttatccccgcccccgaaaaaagagagagtgaagcataatggtttagcctgccctctagagtcaaactgaaattttttattcatcacttgttacctgtgtaatactgggcatgttacctaacccctctgaccgttggtttcctaataattgtattggctttatagggatatgtgaaataatgatatataaatcatccctcacaatgtctggcatatagaaaagtccaataaatgttagcagtagcagctgtagtcattgttgttcctggcccacagaaattaaatatagtctattttgggctttccagatctaaaaaccctttaaatgcatgtgcacacacacaaatatatacacagctagttttctgccatttattcttagggatggacacagtaaaaacatctttattttttacatcttatatgccatctgtctagaattttactagatgaagcatcaatgttaccatctctgaaatccatatgttcttattgaaagcttaaaatttgtcttctctgtagtcatttatcatcttttcaggggtctacagtttctcaaagattaataatactaccagatcttctagtagctactttgatatttctttgtttgagcctagttaaaaaaaaaaaagacatgggtatgagaggctgaaaataaagttgagaattgcctgggtatttcacttagccatgattctcaggtctttgttagacaaagagtaaaattatctataccagggaagagaaataacgtttctactaaataaatgtaaaagtaaccactaataaatactaaataacagagctactgtatgacaagtactgtaaatatatattcatgttatataatatgtttaatccttttagcaactccttttcataggtgagaaaattgagcatcagtatttaagtatcttggttatcacacttctactaagtggcggaatctatagaatttgaatccagctttgtctgacaccaaaaccatatcctttctacctaatatatgctacctcccctactatttggcagttaacgttatactgacatgtatattaaactgaaactatataaagagaagctaataaaggcttttttgctatagaagatatttctagagtcagagaattgatgaggatccatgagtaaacttggcaaatttccctcaataggaaaacgttagcattttagaaatattataaaatcgtgaaatcttagggttgaaagaaaccttcttgattataagttttgttttctggtcacatagcaattatatatgggattatattataaagaattaattttattattgctgtatctgtaatattttgagacttaagataaattattgcttttgtttacttatttatttaccttatttacttctttataccactgtattttaacagtttcttttatattgtatagtctaatggttacacaaacatttgtgtgtaaccattaggataaacaaatagagatttcagaattcttccacatgtaagtgatgccctagtactctaatttataatagagggattgttatggcttatactgaaatactagaagagagttttgcttgcaagacgtgtatacacataggctgatttcatattaagtaattctgctttattataataattcatcctgatcattgttcaataatggattcacattctaccttggttttgtgattgtgctggtgttgtagtataaattatagttattatgcacttcaaatttaaatgttattgataagtaaaattaaacactttccatatgacagcgtgggcagatatttttgtgtagtatgaaacagtgaatttcaaatagtagttaatttcttaaactaatattgagcattatatccctaaagataaaaaagtttaaacccagagaagaaatcatagacactacatctatatctacctctttctctctctctctctctgtaaaatcattccagtttcttctgcttagaacagtaagttccatggggcagggactttgtcactttccccactgtgtttctaccacctagtgcaggatgccatacgtggtagatgttcagtaaatatttgggggcagactgtgttggctttgcagataagtgttatactaaaaatgaggggaatatttttgcttttgagtagattacactgctaatcatttcagagttttgcttgaatatttctgggggtttatgtttttcctgctctgaatttctagatgccattagcaaaatgttttatacaaaagttaagaacagaacgtttatatttgtgttaagtatatgcttatgtgtatttatgttcatgtctttttatctattaatagaaaagtgcagctgttactgtattttgtcttatcaattgctaagggttaggtaagtgttgctttgatttgtagtcccaggtaataagtttaaatctttgtgcttatatataattgtatatgaatatattgctgacaagggaaattattttggttatcaaatatcagaaagtttcatattattgtctgtatctttctgataacaaggccactactttctagtaaatcaggtattttctctgatgttaattaatcctttaagccactaatccaacatttctcagaagtataaacgtggacagtttacatcagattcactggtaatgcttattaaaattacagattttcagcaactaccttagtcctcctaaatcagaatatctacaatgtgagtctctgaatttgtgacaagctctgcagatgatttctctgcaatcagaagtttgagaatcatagtatgaaactttcctggaagtgtctttgcccttaggaggggttccatcctggaagctctacagaaaaaaatccctcactataagctctctgcccatttaagttccagagtagtcagtcttaagacactgattgtgtcagtttgaattacaaccaaaggtgcattatttccaaaagctgttggactggaacaaaacaagaacatcaaaattgctcactagaccaatattgaaagcagacaaaatggcactcagttccagttcctgacaacatcccaggaaatgtctcagctgccttcactggggattgtcactgccaaaaatgctttaccctttaaagcctcgtggggaactaggcactgtagagctgagctgactggaggaaaaaaaaaaagttctacttttttcaggtctacaagagcagagctttctctggtactatgagaatttcagcctaaaaattccttgtatatgagatcttgaccatatgatcaaatcctctctacagccatgacccatcttgaattattttaccacttgcacagggctactactgcattttgcagggttccaaatgcatctccccatctcgcagaatagatatcattccatgtattgatccatctttttctcacttctctatcattagctataaactgattttgaatttcagggtttaaatcaggaactcttactttctagcccctcaaaagccagtttagaaaaaatgtaattttacatatgtacattctatgtaaatttgtttgtatcagagaagtggtaatgctaccttttgtatacaaaggtgatgatactgaattaaatttccagaagtaatgatgagtttttattcatgcatccatgttgtaatctctggccttccttgaattcaggggcattctaaaatgcagtgttttggcctggcatagtggctcaggcctgtaatcctagcactttggaaagctgagacaggtggatcacctgaggtcaggagttcgagaccagcctggccaacatggtgaaaccccgtctctactaaaagtacaaaaattagctggatgtagtggtggatgcctgtagtcccagctacttgggaggctgaggcaggagaatagcttgaacctgggagatggaggttacagtgagccaagatggcggcattgcactccagcctgggtggacagagcaagactttgtctgactggaaaaaaaaaatcaaaataaaaactaaaatacagtgtttagttagagaacagaccataccaattaatttttacataaattaaatccatgacttgcctggcattttgccctagccaaattaactagcctcagaagttggattttgcctctgtgtttgtttcattttctcagtcaagaattaagagtactgacattacatattaagcttttttgtatcccctggggtaactaactagcatggtggcttatacatagcaggtatttaggaaaaaaaaacacactttgatttactgatattgattatgtttcaatacaagggcagttcagctactttgcatggacttctttgggaaggatttactatgatttctatttctatattcgtgtatgtttttgtgtttgagttcagtcatacttattacttacccatcttcttattgaacctcccttttgatcgaatgtgattattgcattggtggtatattagttgttttgaagaattaatatttctttctaattcaagcctatgatgtgactcaggctggtgatacaatgatggtattaagacaatgttcatccccttcaacagggaaagtaaaactgttcaacttgcttttgaatacccagtatacctgttagtaatttatttaggaaggtaatagtctcttcatatattagaaattttgccacattaagcaaaatcttagaaaagtcagtatttatcagaatttaatattaggaaatctttttcaaaggaattgaacatatccaaatcggagctaaatactgtcacaaatagctctaattttttcaccttcaagcaaaccacattcaggtgttagctattggctctgaagtagttgttctatatactataggtgttggaggcccctccttggtggattttgaaacagtagaaactcataatgattgcattctcttaggaatcttacttaatctggctgcagcgtgcagaatttatttcaggagtcagaccagataggagactgttatggactgaatgcatgtgtgtccccctctcctggcgttcatatattgaacccataatccccaatatgactatatttgaaaacagggtctgtgaggaggtgataaaggttagatggggtcataagtgtggggccctaattggatagggctgattccattatacgaagaggaagagacatcagagctctctctacaatgtgaagacacaatggagaagtgtgtaatgcatgctgtgtataagccaccatgctagagaaagtggccgtctgcaagccaggaagagtcctcaccaggaatggaatcagccagcaccttgatcttggactttccagcttctaaaactgtgagaagtaaatttctgttgtttaagacacccagctgtatgtttttcttgcagccagggcagactgagactgagacagagacagagaacactgtcataatctaagcttgaggtggtaaggagtgtggcatcaggaaagacagcaatgagacaggtatggtgggaaaggaaagaaagtggtataagagaagggtccatgggacctagtggctgacagcatgtggggacaaaggatgatgtatattatctgtatttcccaaagtggggaaaattttttaagtccaattttgttgagggttctgccttccaggcccccaggtttggtgatttgctaggactaacaggactcagcatatagtcctcattgctatatttattacggtgaaaagatacaaagcaaaatcagtaaagggaaaaggcacatggggcaaagtctggaggaaaccaggcacatacttccgaatcttctcccagttaagttgcacaggatgagcttaattactcaagtatcaagttgtgaaagtatggtaaagtgttatgtgccagagaagcttgcctgagcctaggagttcagggtttttatcaagagcccatcacataggcaccctttgcctagaatatacccaaatttcagactctcagaaggagtttaacatgcatcacattgttcatataacagtttaggtacaataaaccacatttatcagggaataatggcaactgctgaaattcaagtttccagttgccagcaaagggccagcctttcaagcatttcattctaagaatagcagtctcagacctgcagtattaactgttttttgcacagtaatattttaaactagaaagggaacattaaatatatgtcactctgtttttcttactgaagtttgtgcataatagaaacaaattttaaccctaattattgtcttcagttggccacacaaaaggatatttttgagaagtgttaggaagagaaaaacaactctgaatacagtgaaatgttgccatgcgtttaaagtcagccatggaacataattttaggttatattctcctgtagagtaagagttatatacacagtatctttagtaataaatacctagagagctcaaagaggtaagatgcctttgctgaaggcaccatctcttgatgacataggatctctgtaaaccttgctggtgtgcagaattcctcatgtgtcaggtgcacaatcccaaagctttcctactttgtacttcaggttcaaagagatttttaaagcatcttattttcttgattttggtatagcatctactgcccagagcactagatgagtctcagttggaagtgggaagcagaaatagcataggttcaggagcttccagaaaacaggatgccctgacagtgttttcctttcctgtaccacgtgtggccctttctttccttaggatgttaccttagaggtttctcttgctagttaatagaaagatagttttgggggcagaccacaaattcctaggtatggtttgaggtaagcataatttgacacatataattacattatgttaaactttaaaagttctcaaactttattttaatgccaaccacatcttgtttagaatccacatatgtaaaacatgtaaaagctgagctgctgagcaggttgagctgaagcaggctgaggagtcctgcaatcattcgcccctaaagctcctgcagagaatcttaaaagttcttggagattgcttctcccctctaactccgttgtagtagagatgagaaaatgaatgatcaggaaattaatctatatcagttagttctttcaagtccttacaaacccttttctagaacttctttgactaaccccattttctcctgtagctgttcctgtaacgttttatataaacatagtgcttatcattttgttttatacataaatgtttgtgttgtctccctcagagtccctaacctcagtctattttttaaaattaattttagatcctcagtgcttaatgtaatcctagtatatagtaggtagttaataaatactgcattaaaatgaataaatttattcaatactttccatggaaattatttattcaatttgtagtatcattttgcattcttgatgtcttaatttcgaatggttctctgttaatttctgagattgtttatttcttcaactacattgtcagctttttaaaaatctttattgcctactccccaacataaaacccagaataataggagtattttggttaaccaaagagaattccatagaaaatgtcatgataactgtagctttacttccttcttactacctctcaaaatgttcctgatgtcagctagtaagagtgctctgctctttcttttatgaggccagtatgtaaagaagcagtgtataactgaaataatgtgaatttgtctccaggatctaccacttattacctgttgaccatggtcataatatcgaacctctctgatgatgatgatgattattattattattattattattgtgagatggagtcttgctctgtcgccaggctggagtgcagtggcacgattttagctcactgcaacctcctcctcctgggttccagtgattctcctgcctcagcctcccgagtagctgggactacaggcgtgcgtcaccacgcccagctaatttttgtatttttagtagagacagggttttaccatgttggccaggatggtctcgatctcttgaccctgtgatccacccgcctctgcctcctaaagtggtgggattacaggcgtgagccactgcgcctggccttctgattcttatttctgtcatctataaagcagggaaagtaatatctgccttatgataaataaagaaatgacatattatgtgttttaatgtatgattgtattaaatgtaatgtatgttacaataaatatttaaatattaataaatatcatttattaataaatatttaaatgatagctgatgtcatatacaagcaggtgtgatgaacctactagtggtgtttaaattttaacatgagtaaagatcaccttgggagcctgttcaattgcactttcgggtttagtaggtctgagttaggacctgcagttcttcatttctgataaactcctaggtgctgctgatgctgtagtctacagagcacacttggtgtagcaggcactggagtattcaagattcccttgttatgcttttttttcttttaacatacgttgaatgattggttggactgtctttggcagttattttatatcttctcagatattgtgactgtttttaaggtagttaacaataatattgtggactcatccagtgctttgttttgaaaacttttttgttacaatgccagggacacaatatttttaaaaatattttgtagtgctgtatatccaaatattaggggcaaacaattaaggtagacatgatgatcttatctacttttgtaggtaaataggtttattgaatttgaaaggatgccaagcaaggatttatggcatattaaggcagatcaagccaggaatggtggttcacacatacaatcccagctctgggaggctgaggtgggaagatcacttgagcccagaagttcaaggctgcagtgagttatgattgtgctactgcattccagcctgagtgacagactgagaccccgtgtcttaaaaaaaaaaaaaaaaaaaaaaaaaaggtcagatctttggccatttgcttctgctgtataattatctacaggccagtaattgaaagtataaacctaaattcgcaatgttagatgaacattataacttattagaacattatatatgtataattaacattataccagtatataacattataacttattatttagaaagattgtaaatctttctaagttgaagttgaaagaacaatagggtgggagtcaggagatgtgaattctgggtttggctccaacaaaggttagcggagtgaccttggaaaggtgagagttaattcttactttttccatgcattcatgatactttataaaaataacttttcaacaaagttctcagtcctctatgtaagagaagatcttacctatgacaattttctaacctttagcattctgagtttaaatgtaaaactatcaaatgctctgaaaaattaatgttgcctatgctatttttattttaattgtattaattttgttaataagattttaatagtaagttttggagcaatttactggccagctgaatatctaagatatttcattcaaatttgaatatgtttttacaaaaatataagtaaagcaattgtaaaaacttttacactataatttcagtttttttcctaatttatgcaaaattatctattaaagtaaaagacaaaacacaagagatttatgaattctttaatattatgttattcagccactatatgtaactctttcaaatactatgttaatttgtgagtacctccacaacaacaaattaaaacatgaagtaaggaaatggacatttggcactattgggaaatgatacttggttaagcagtgctttattgcatacttgatatttgagaggaaggatttgacaagttaattagtcttttctcttacctaagtgatttcatcactcaaatcctccagaagttccaaagcggtatctatctctgtcttcagcagcagcacaaaccaaaccttgagagaattctgacacatgatccccttttattttgaggacatagggcaagagatgtgcagaagcatttccttggggcttgaagatgttatttgtgagagtagatgttcaaggttacagatcatacagtgtcagtctgagggccagatcctagtggcagaagacgttcatgtgttcttcattaaatttaatttgggttatttgtgacagctggggccctctgaaacatagggtttgtggcagggtcccctctttcttagacctaagggtgatactgcttgtgtaccatagtcccaggagcagaactgggtgtgctgagatatcaaagttatgcatgtaatctcagccaggttattataattaaatattatttgggtaccagataaaatgctgaaagttaatactggataggctgctgtcataaatctccttagctaatctatatgtttaaatggcagccagacaactaaagtatgtgaacaaatagcattgcaagctaaaattatgcttttcataagcaaataaccttcactgtgcttcttagcatcttggagttgttctcttcttggttgtggctactgttatgatgttcatatatagtaatcatcaatgtttaacatttaggacttctgagcaatcaagtaagcattgaatttttatcttatttctagtgtagaaagtaggaaaggaagtagagaaaattttcaatttagtgttgattcaaagtcaacaaatagatgatggctatttcacataattttctggtatttgctttctatagcattgttttcaaagtcaaggttctcatgggggagaagtactggacatctggacatcttttttctgacagcattgtcataagctgtgataactattttatgtttaaaactaatgtaatcagacaacattgtagtgtgcaataggaacccttatataatgtgtgaaatggtaaaattatatttatttaagaggatattgacatttattttgtatttgactctatacaaaataagtttttactgtatctacattaagaagatctccagtaagtgctttgagatcaattagtgcttaaattagcatttagagatcagtcatttagagatttttttcaagtatttatataaaacctgcatggtatattttataaataggctgctaatatagataggattctcataggtgagtggtaataatgtcataaactagtaataagttttataattactttaatatgattctgtggttaaaaaataagtttgtactatgtacataaagtatttatgaggcagcatattttgtcaaagaataatatttatctagtatatgcatattaccttctattttccccgtctagttttcaagtatatctttttgaactttagtcccctctgtgattgatttttaccccaccttatttcaaagaaattcaaggggactatctcttaacttttttttcctgtttttgttgttgttgttatttgtttttcggaggtgtgtgtgtgtggttgagacaggatctcagtctgttgcccaggctagagtgcagtagtgcagtcatagctcactgtaaccttgaactcctgggctcaagcaatcttcctgccttagtctccttagtagctagtactataggtgcacactgctatgcctggctaattaaaaaaaaaatttttttttaagagatggtgtctcactgtgttgcccaggctaatcttgaactcctggcctcaactgatcctctggcttggcctcccagagtgctgggattatttaaaaaccaggcaccacattcagccttggttttcaaattcttttcaggaagtctttttattaaatacgaaactatatcccaacctcaaatgcattcatacatggggaaaatgtaactttttgaatgtgttgaatttataaatgaataagttctttgttattatttatatcttaagtccttcttaaattagagaccaatacaacttacaaaccgttgctacctatgaaacctttttcaacttttgtgtcttctcaattgtattctgagtaacttccatcttccatcattatcattaatataatactggaaagagtagaatggaaatgatactggcctgagtgtttttaagtttccaaaagatatttggaatcttctgtctgcatttcaacagggccttggcttcgattgcttattttactataaagtgtgtttcacatgtttgccacaatatccttaaatatgctttgctgtttgaccgatgtaaaatcatactccagaaacacctgcatccaagaataactgctgttgaacaatgtgtctaaggctttaatgcaaataccaatcacttggggatcttgctaaaatgtaagttctgattaagcagggttggcatgggcctgaggtcctgcatttctaacaagctcccttgtgatgccactgctcctggtctaggtaccataccttaaggagaaagtatgggttacatctatatgtctagtgcttcctaatgcatttgcccagtgttacaggtctaacttgttcttaggcagtggttctcaaactttagcatgcatgagaatcacttgggagaatgttggctctaaatttacacgcttgggctccactcatcagagtctattttggtgggactttgggacccaggaatttgcacttttgaaaactcctcagattttgatgcatatggactaacaccacaatttgagaaactgatactttaaagtttggaattgctatagaaattcatggtcccttctggaatgacagcttgttaaagccaagcaaggatacagtgaaaagcccatctgaaaggagattgctttgaatgccagtgtagtatttggttaatggggaagcagtagtataaatttgcatgcttttcttttctattccgttgcttcaggcaatataatttactaggtgtattaatttattgtaatataccaatggtgaagaccatagctcattcactccctaattaaccctagaggagtcttaattggataattggttagaaatagtagatgagtaggtatattaaatgttgaatggatggtcagtattgattctactcttggattctgactaggatatttactctctctctctcagaaacatctatatctttaatattacttgctattgtatttactaactgtcacaagaatagcctgttccacatataaaatacagagttggttctcatgttttttgttgaagggaattcggataactagtgagttgtttgtcattttcatttaagacagaagttaaattctaaaagtatgtcactcagtgaatttttaaaaattatatcttttaataactttaagattgattcttcatctattcatgtctctgttttaaggatgtgggtggtatttatataattcctaattgattctataaaaagtattttaaacaaaagggttatatagaggttatagttattagataatcttgtcagaaacagtgccatttagaatacttggttcagcaaactgtttaatgtcagccaaagtgatttaaaagctttatttaggattaatccatcatctgcttaaatttattatctcatttattcactaatttgcatatgactttgcaattcagaaattttaagcaaacagtgatatacccaaaaatggattacaggataaattgaattaaagcaaactgcagtgcaatcaaggccagctctggacagaagcctgggattagtgagctgtgattacatcactccttttctgctcctccgcctttaagagcaagcttctttatgctatccctggatggttttgttccaacccctatgctatgaggtctctcttgcccttggagatttaaagttttgtatcagaaatagatttgaagatcatcatgaccaaatgtagttagtgctatgtgagaaggatatctatcacacaaaatgctttatggtcacagagagattagttctgtctgaagggaaaggggagaagatgacaaacatgccatcggggcaattaacatataacccttccacgggtgagaatactggaccaaatgacctttttggggtgcctttctgttgtgaattttctagtttattaataacccaagaactgtgccttatagtccatagtattcatacctctcaaaaccaaggtacttaggattggggaggaaaaagactctactaatttttaaagtagacctaaacaatttgcactgcctgtgtctttgacctgattttttactctcacctttctttatctgtccagttacctttgtatactaccaaagctttaaccttctgtcctctcaaacttttttaaattttactttatttaactaccaatttatcaaaacagtcatttacacttgacgccagcccactccgaaacagctgctgtctagcttctgctaccagcacttgactatgcttatttgaagatcatcagtgatacactaattaaaactccagtgacttatctggctttgtgttccttcatctatgccacagttgaatcattgaccactttttgcttgaagttctcagctcatgctgctttctgttgagtgcttctcatgctacctcagtggtacttgttaaatgttttccttttctactttccctccatttagtcgcacaaagcccccaccctctatactcgtctctgcctatttaacagatcctacctatgctctaaggcctggttcataggccatcttccctttaaatctttgagctaaaatgttttctcagttctgtagtttttaatctaatttttacttggagcacttttaggatgactgttgccttgatagtatgattttgtacacatttcttaactactctagcagatgttaaaaaaataaaaaaaggagagaaatcatcactgtagcttctgcaatgctgtgcattattagaaatctttaaatatttttcttaatatactgtggtagggagaataatggcaccccaaagatccccatgtcttattctttgagttagtgggtgcagcgcaccagcatggcacatgtatacatatgtaactaacctgcacaatgtgcacatgtaccctaaaacttaaagtataataaaaaataaaaaaaaaaagaaaaaaaaagaaaaaaaaaagaaaccactgaatatgttaggttacagggcaaagtcaaattaagttggaattaaacctgttaatcagttgatcttaaaatgtggagattaatctggattatgctagtgggcctattgtaatcacaaacatctttagaaataaaagagggagtcagaagagagagtcagagtgataccatgtgagatctcatcccttgctttaaagatggaagaaaagaaccatgagcaaggaatgtgggaaacctttaaaaactaggaaaggcaaataaaaggcaagaaaatagatttccccccagagcctccaaaaggaatgcagctgatgtgttgattttagtctagtgagacccatgtcagacttacgacttaccaaattgtaaaataaatactaaaaattcagagacaaagggataagtaaaataggaaaataaaactcattattccaagacttgcttaattccctttagaggtaatttgttcattattacactgttttttggttgttttacaaaggaattctatataatatagttatcccagtgaagaaggagcccagataagatatattgatttattcttctttctttttgtatgttgtaaaacagagtcttgctctgttgcccagactggagtgcagtggcacaatctgggctcactgcagcctctacctcctggctcaagaaatgctcctgccttagcctctaatagctgggaattacaagtgtgccacgtaatttttgtatttttatagagatggggtttcatcatgttgcccaggccggtctcgaactgctgggctcaagcaatcctccctccttggactctcaaagtgccaggattacaggggtgagccaccatgccctcacacaaaaagaaattggttggtacatatacacagctttctgatttctttttatttgagcttcataatttgaaaaagatacctctgttgttcagtggggctgctacatagtagaagctcaataagtattgaatgaatgaaaaaatagaattgataaataaagagaaaatgtctttattcattctaagaaacaaattaccctttagcatttttttaatttttaatttttgtgggtacatggtaggtctatatttatggattacatgagatattttgatatatgcatgcaatatgtaataatcacatcagggaaagtggaggtatccatcacctcaagcatttatcctttatatttcaaacaatataattatatcctttttagttgttttaaaatgtagaatttatttttgttttactatagttaccctgttatgctagcaaatactaggttttactcatactttctatttttgtacccattaaccatccccacttctctcccaccccctgccacaacttcccctctcaacctctggtaaccatccttctactctctatctccctgagtcaattgttttaatttttagctcccacagttaagtgagaacatgcgatgtctgtctttctgtgcctggcttatttcacttaacatagtgacttcacgtttcatccatgttgttgcaaatgacagtatctcattattttttatggctgaatagtacttcattgtggatatgtaccacattttatttattcattcatctgtcgatggacacttaagttgctttcaaatcttggctattttactcctgtaatcccagcactttgggaggctgaggtggtcagaagtttgagaacagcctggccaacatggtgaaacctcgtctctactaaaaatacaaaaattagccaggcattgtggcaggtgcctgtaatcccagctagtcaggagactgaggcaggagaatcactggaattcataaggtggaggttctactgagccatgattgcaccactgcacaccagcctgagtgacaactccatctcaaaaaaaaaaaaaatcttggttattgtaaataatgctgcaataaacatttgagtgcagatatctctttgatattctgatgtcctttcttttgtttatatactcaatagtggaattgctggatcatatggtagctctatttttagttttttgaggagcctccaaactgttctccatagtggttgtactaatttatatttccaccagcagtgtaggaaggttcccttttctccacatcctcgccagcatctgttattgcctgtcatggataaaagccattttaactggggtgaaaagatatctcgtagttttgatttgcatttctctgatgatcagtgatattgattacctttacatatacctgtgtgtcattcgtatgtcatctttggagaaatgtttattcagatgttttcccattttttaataagattgttagatttttcttctatagagttgtttgagaaccttatagattctggttattaatcccttgtcagatgggtcgtttgcagatattttctcccattctgtgggttgttgcttgactttgtacattgtttcctttgctatgcagaagatttttaccttgatgtgatcccatttgtccatgtttgctttggttgcctgtgcttgtgtggtattactcaagaaatttttgcccaggctaatgtccttaaaagtttccccaatattttcttgtagtggttttataatatgagaccttagatttaagtctttaatccattttgatttgatatttgtatatggtgagagatagggttcttctgcatatggataatcagttttcccaacaacatttattgaagagactgtcctttccccaatgtattttctgagcaactttgtcaaaaatgaattcattgtagatgtgtgggtttatttctaggttctctattctgtgccgttttggttatgtagctctgtcatataatttgaagtcagtaatgtgattcttccagttctgttctttttgcttaggataactttggctattctgagtttctgtgctgtcatgtaaatttcaggattgttttccctatttctgtgaagaatatctttggtattttgatagggattgcactgaatctgttgattgctttgtgtaatatggacattttaacaagattgagtcttccgatacacggacatgaaatatctatccatttgtgtgtgtgtgtgctctttaatttctttcaaaagtgtttcatagttttcattgtagagatcatttacttctttgattaattcctaggtatttaattttatttgcagctattgtaaataggattactttttaaatttctttttcagattgtttactgttataaaaatggtttttgtatgttgattttgtgtgctacaactttattgaatttgtttatcagttctaatagttttttggtggagtctttagttttttcaaatgtaagattatatcatttgcaaacaaggataatttgactgcttcctttccgatttgatgctctttatatccttctcttttctgactgctctagctagaactttcagtactatgttgaataacagtggtgacagtggacattcttgtcatgttctagatcttagaggaaaggctttcagtttttcccagttcagtataatactagttgttggtctgttgtatgtggtttttattatgttgaggtatgttccctctatccccagtttttggagggtttttaccatgaagggatgtggaattttgtgaaatgctttttcagcttcaatggaaatgattatatggtttgtgtcctttattctgttgatgtgatgtatcacatttattgatttgcatatgttgaatcatccttgcattccagggataaatcctacttggccatgatgaatgatctttctaatgtgttgttgaatttggtctgctagtgctttgctgaggatttttgcatcaatattcatcaatgatattggcctgtaatttccttttttgatgtgtctttgtctgattttggtataagggtaatactggccttgtagagtgagtttgtaaggattccttcctcctttatttttctaaatagtttgattcagattgatattatttcttctttaaatgtttggtagaaatcagcagcgaagccatcaggtcctggacttttctttgctgggaaacattacagctttggtattgttgtttgttattggtctgttcaggtttttggtttcttccttgttcactcttggtaggttggctatatctaggaatttatacatttcttccagatttcctaatttattgaaattatgtttgctcatagtagccactgttgatcccttgaacatctacagcatcagttgtaatatctcctttttcacctctgattctatttatttggttcttttttcttttttttttttttttgtctggctaaatgtttgtcaattttgtttaacttttaaaaaaacaattttttgtttcattgatcttttattctgttttcttcatttcagtttcatttatttctgctctgatcttttttttttttttagacggagtctcactctgttgcccaggctggagtgcagtggcgtgatctcggctcactgcaagttccacctcctgggttcgtgccattctcctgcctcagcctcccgagtagctgggactacatgcacccgccaccacacccagctaatttttcgtatttttagtagagacacggtttcactgtgttcaccaggatggtctcgatcccctgacctcgtgatctgcccgcctcggcctcccaaagtgctgggattacagacatgagctaccgcgcccggcctctgctctgatctttattacatcttttcttctaattttgagtttggtttactcttggttttctagttctttaagatacagtgttaggttgtttatatgaagtttttcttcttttttgatgtaagctcttatgtctataaactttcctctcagtgctgtatcctgtaggttttggtatgttatatttttattatcttttttacaagatatttttcaatttccttcttgatttccttattgactcactcatcattcagaaacatattgtttaatttcatgtatttatatagtattcaaaattccttgttactaatttctagttttattccattgtggttagacacttgatattttttcagttctttttaatgttttaagacttattttgtgacttaacatatgatctgtccttgaaattgatccatgtgctgaggaaaagaaggtgtattcttcaactgttgaatgaaatgttctgtaaatatctagtaggttcatttgttctatagtgcagatttaactgatgtttccttgttgattttctgtctggaagatctgtgtaatgctgaaagtggggtgttgaagtctccagctgttactctattggggtttattagagctactctttagctctaataatatttgctttatatatctgagttttccagtgttgggtccatagatacttaaaattgttatatccttttgcagaactgacccttttatcattatatagtgaccttctttgtctcttcttatagttttgtcttgaaatctattttgtctattagaactataactactcctacttttttggtttccattgggatggaatatctttttccattcctttggttttagtctacatatgtctttttaggtaaagtgtttttcttgtaggcaacagatcattgagtcttgtttctttatccattcagccactttgtgtctttttattgtagagtttagttcatttacattcaatgttattattggtaattaaagacttactactgcctatttggttttggttgtttcgtggtcttcttatccctctttccttccttcctgtcttccttttggttaaggtgattttctctgttggtatgatttaatttcttgctttttatttttttgtgtatctgttgtatgttttctgatttgaggttaccgtgagacttgcaagtaatatcttataacccattattttaagctataacaacttcacactgtttgtataaacaagcaaaaagaaaactgagtgaaaactctacatgttaacttcatcccccagatagttaatcttttgttgcttctatttatatcttattatactgcctgatttcaaaaattgtagtagttactattttctgttggctcatattttaatctttctatttaatataagagaagtttatataccacagttacagttttataatattctgtggggtttttttctgtgtatttactgttactagtgagtttgtactttcagtttatttcttattgctcattaatgtccttttctttctgattgaactactctctttagcacttcttgtagaacagatctagtgtttaaggcctttggcttttgtttctttgagaaagtctgtatttctccctcatgtttgaaggatattttcaccaggtatactattccaggataaaagttttttttttttctttagcagtttacatatgtcatgccactgtctcctggcccataaggtttccacttagcttactgtctgacttagagctccattgtatgttatttgtttctcttctcttgctgcttttaggatactttttttatccttaacctttgggagtttaactattaaatgttttgaagtagtcctctttgggttaaatctgcttggtgttctattagcttcttgtacttggattttgatagcattctctaggtttgtgaaattctttgctattatctctttggataaactttctaaccttatctcattctctacatttttttaaggccaataactcttagctttgcttttttgaggctactctgtaaatcttctaggtgtgcttcatttttttttctattatgtcctctgagtgtgtattttcaaatagtttgtcttttttgtctatttttattattatattttaagttctagggtacatgtgcacaacatgcaggttagttacatatgtatacatgtgccatgttaatgtgctgcacccattaactcatcatttacattaggtatttctcctaatgctatccctcccccctccccccaccccacaacaggtcccagtgtgtgatgttccccaccctgtgttgccaagtgttctcattgttcacttcccacctatgagtgagaacatgcggtgtttggttttctgtccttgcaatagtttgctcagaatgatggtttctagcttcatccatgtcgctacaaaggacatgattccattcaggacataggcatgggcaaggacttcatgactaaaacaccaaaaacaatggcaacaaaagccaaaatagacaaatgggatctaattaaactaaagagcttctgcacaataaaagaagctaccatcagagtgaacaggcaacctacagaatgggagaaaatttttgcaatctacccatctgacaaagggctaatatccagaatctacaaagaacttaaacaaatttacaagaaaaaatcaaacaaccccatcaaaaagtggacgaaggatatgaacagacacttctcaaaagaagacatttatgcagccaacagacatatgaaaaaatgctcatcatcactggccatcagagaaatgcaaatcaaaaccacaatgagataccatctcacaccagttagaatggcgatcattaaaaagtcaggaaacaacaggtgctggagaggatgtggagaaataggaacacttttatatggttggtgggactgtaaactagttcaaccattgtggaagacagtgtggcgattcctcaaggatctagaactagaaatagcatttgacccagccatcccattactgggtatatacccaaaggattataaatcatgctgctatcaagacacgtgcacacgtatgtttattgcgccactattcacaatagcaaagacttggaaccaacccaaatgtccatcaatgatagactggactaagaaaaatgtgacatatttacactatggagtactatacaaatagtttatcttaaaggtcactaattctttcttctgcttgatcaactgtatttttcaaatccagaatttctgctttattctttttaattatttcaatctctttgttcagttcatgtgatagaattttgaattccttctctgagttatcttgaatttctttgtgttttctcaaaacaggtattttgaattctctgtctgaaaggtaccatgtgtctctttctccaagagtggtccctggtgccctatttagtttgtttggtgaggtcatgctttcctggattatgttgatggttgtagatattctttggtgtctggacattgaagggttaggtatttattgtagtcttctcattctgggcttatttgtaacggtctttcttgggaaggctttccaggaattctcaagtacttgggtgttgtgatctaagcactgcctgcatgaaggggcaccccaagcccggtaacactgtggttcttacagactcataagatgccgccttcgtggtcttagataagatctggaagagttctgtggattaccaggcagagacacttgttctcttcccttgctttcttccaaaccaacagagttctctctatgttgagctgcctggagctgtgggttgatacaagtgcccctgtggttaccaccactgggattgcactgggtcagacctggagccagcatagcattttgtctcactcaaggcccagtataaccactaccaggttatcgcctatgttctctgaaggccctagggctctacaatcagcaggtagcaatgccagaaagtcttgtgtttttcctttcagggtagtgagttcccttaggcccaaatgggtctagagtagctgtccaggtgctagggactagaatgaaaaccttctaaatctacctgatgttccattgtactgtgcctgagcctaagccacgagtcacggtttttcccgttcttccctcctctttccacaagcagaggagcctcagcccacggccatcaccaacacaggcccatggggagtactgccaggcttccaccaatgttcatttaaagcccaagtgctctttagtcagcttatggtgaatgttgcctgacctaggactcacccttcagggtggtgggctcccctctggcccatggcagactcagaaatgccatctaaaagccaaggcctggaatcggggaccccaagaacctgcctcatgctctatctccctgtggcctagctggtacctaagatgcaagacaaagtcctgtttactttttcctctgctttcttcgagtagatggagtctgtcatcatagctaccacagctgggaaagtgctgtgtctcacctgaagccaacatgtctcagagtctcacccaaaacccatggcatactccatgagtattgcattggttattcagggccaaagggttctttagtccacaggtgatgggatctgccatgactgggtacttcctttcaagtcaatgcgttcccttctggctgagggagtttctcaaaatactttctgggagctaaggcctgaaatgggggtctcacaacattgtctggtaccctatcctactgtggctgagctggtatccaagatgcaagttaaaatcctctttactcttccctttcctctcctcaagcagaagcaaggggtcccttttggagccacaaggggtctcttttgcagcctggagctggaggagggtggtgcaagcactgtattaaccattgtgtctggtgtctcagtaagttacatgtccccccagtccactggctctgacaccagcccagcacaaggactcacctacgacttagagtccttatggcctagattgcctttcaagtttatttaggtgcccagagcactccatcctgcagtggcaaggcttgctggaactcagattttgactgctcagatgggtgattcccatctggctagagccagtccatatgctccttccatgagtggctgtcagctaagtacagcctggttctgcttttgctatgacaggacagcactgaattaagtgcagcgtgtcacaatcactgcattctttctccccagatgcacagattcttcttgccatgcagccactgctgggggatgagggaatgattgtgttggcagttcaagactttttcctgccctattcaatgcctctttctgtaatattcagttaaaaccaggtagtgtgaatgcttacctgatttttggttcttagaaggtgcttttttggtgtagttaataaatttggtattcctcttgggaagacaatcagtgtagctttctattccgccatcttgctccaccctctatgtcgaattactttttttttttttttttttttgagacaaaatttcactcttattgctcagactggagtacagtggcataaccttggctcactgcaacctccgcctcccaggttcaagtgattctcctgcctcaacctcccgagtagctgggattacaggtgcatgccaccacgcctgactaattttttttttttttttttgagatggagtctcgctcttgtcgcccaggctggagtgcagtggcacgatcttggctcactgcaacctctgcctcgcagattcaagcgattctccatctaagcctcctgagtagctaggtttacaggcacatgccaccactctcggctagttcttttgtaattttagtagagacggggtttcactgtgttagccaggctggtctcgaactcctgacctcaggcgatccgcctgcctcagcctcccaaagtgctaggattacaggcatgagccaccgtgcctggtctacttttaattcttcaaatgcactgtattcttatctccacccaccctgcctcaactgtactgtccctattcctcctctcttacacaaataatacttccattacatgaaggctttgttctccttccctttgaataagtcctacggattttaaaaattttgatttaaatcttaagccttttgtgaagggtttcttccttcatcactcactgcctttccttcccctcttccatatgtataagcaggtatactcactttttgtttccatagcaccttgtacttccaccgtagccttaatacattgcagcattattgtccatttaattatctttttcattaggctttaagctccatgaggttagggactatgtctctttttcatcattgttgcattcccaggcttggcataatgtatattttaataaatatttagaccaggcacagtgactcacacctgtaatctcgcactttggaggctgaggcaggaggcttgccttagcccaagagtttgagaccagtctaggtaacatactagatcctgtcactgcaaaaagttaaacaaaattttagccaggtgtgttggtacatgcctgtagtcctagctacttgggagactgaggtggggaggtgcttgagcttaggagtttgaggctgcagtgagctagaatcacactactgtacttcagcctgggcaacagagcagagaaaaatatataagaaaatttatatctagaataacactcatgaaatttactagtaatctcagatgtgtccaaaataatactctcagtctaggtagatatgaatattgtttttaggttgtttattagctcatttgttgaagttcatagccctacccaatattaaagttgatgataattttataggcttggccagatgtggtggttcatgcgtgtaatcctagcactttgggaggctgaggtgggtggattgcttgagtccaggagttcaagaccagcctgggcaacatggcaaaactttgtctctactgaaaatacgaaaaatcagcctggcatggtggtgtgcacctgtagtttcagctacttgggaggctgaggtgggagaatcacctgactccgtgaggttgaggctgcagtgagccgagatcatgtcagtgcacttcagcctgggaaatgggagtgagaccctgtctgaaaaaaaaaaaaaaaaaaaagtataggcagaatgtaacctcctgtaacagcaaaatctacttttaagtaaggtatttgaggtttatccagagttcaaagttgacatcttgacattgtttcacatttatatttgaacttaaatactttttggcagttgccatttttcagttagatggtatttttcaaacaaataattttattttttctgactttccttctttggagcctagtaattttgggagtatatatttagaacatcgtgtatagttttttaagaaagaaaatggcattgatctatttcttttgaaaataatactctgttggtggtttggaaaggtttatgtagaggtaaatgggtttatgtctgttgatgggctcctgcagataaagccacagacatcttcagccatgctgcttttgtgttgatgttctgtttttcccttgggacaataggtgctgttccttgtaaaaatatgataggaaaggaaatttgttctgttttgctgctatttaaagcaccacagacctgctcagtagactttgacactctattcatctcatcctccgttgaattattgttgttgttttattagggaaaagttttccttggagataattcctacaaagtaattataatttacaaagttttcttggttttccatgtgaaatgaaattatttctggagatttgggcctatgaatatctggtttcagagtcttaatcattaattgttttgcctcctatttagatgattaaagttaaagctaatttattttctctgttttcattactaacgtaaaatttttaggtggccagtagaaagaattcctaacagccaaaatctctggtcttttagaatgtcattttaaaccacttttctctcatcttcttatacatatttgctccgactctacctttcactgtgggtttcatttaccctggaacctaggttactaggggctgcaggaagtacctggtgcagggaatactagtacccattctttcatagccaggaaaaaggggagagggtgttggaatatacacaaacaagtcaaagttggggagacttgagtgcatcaagtcgataagtctttgccaagtcctgcctactgagggatgctcagtttctacagggcagggaagacacctttggtaagaaaataatttaccttctagcattgacccccttatcaatcccttatcctcctttagaagaattgaattgcctgtggttagcttctaacttccccaaagcatgtagtactctgcagcctgggttgtaaggcttataatgagtgtttgccctagtctggggattctttttaccataagtggtgtgtctgatggaaactgcctccctctggaagatatatatcatgaactctcattgtttcagtgtaacttctagtctcacaaattcatggagtgaaagtcagagagtgaaatttagcttagtttctatggggatgtgagtaatctttagggattattaaaacaatatactttttttccccccaagttttcccttgctcctctttttctagctcttcccccattcacctatggaatcatctgcattcattatttcaggagagaggtagatacagtctaaaatgtaggagtaattgctcagctctgagacttacattttataaaaataaattcttatcttaatgtaaaatacttcttcaggaacaaaattcaaaagatccaaaaggatctaattgtacataaatctcctccttctttctccccaacccaccagcattctttctctttgtcattcagttctgtatacacaaacagtacatagtttacactcttgtacaccttgcttttttcaagtaatacctttgctatagttctagattggtacatattaaactacctcattctttttaattagttatagtaatcatatcttactggtagatattacttcagttcctcatcttatgctttcacaaatgatgctgcggtgaaaatccctagccacacatcattttgcacacatatgagtttatcgataggataaattcccaggagtagaattactaggtcaaagacttattttattttttagagatgagatcttgctgtgttacccaggttgctctcgaaccctggacacaagcatttctcctgcctcagcctgccagtgtgctgggattacagatgtaagccaccacatccagccaagactaatatttttaactttgagtttaaatttttttttctatgtcaaactgtagacatgaaagtttagggttttttcctgaaacaaatgaagattttctaaattctagaaatttcacaatatgtattaacaaaatttgaaaatctgtacataattccactatactctatggtgtagaaaggactgaagatgatacatggacaatttttgccacattagaaggaaaatcctttccagtgttgagaagaagagccgtaggtcagtgtctttattcccctgtataccttttcaggagctgaacttcaaaagtaggaaacagggaggtattgacagtgatagtgatagtaatagtgaaaacagtcagttaggttctggagagaatctgagaacagcaagattgtctgagaaagacgaccctctaagggatagagaacttctaagagcactggtagactggccaaagcctataaacagagcatggaggctgcagaatacttggaccttaaaaccagaagatacagcaaaatttgagggcatcagtagtggttgccaagaagaccagccaaatctcagtgaacacaacaagcacaggatatttagtgaccaggtcaagtgataaatatctcaattgaaggcaaccaattgcctgacctacagcaagtgaactagcacgcgtgtcctctccaccatgaccatgaaacaactcagcttcctccttgtacctagttgccatcccaggaatgaagagagagtagagagattccttaaagaagttggactttttatggaaagattgtttgcctgaaagagactgctttaaactaggagaccaagttatgtttagttggtaaatttgtgacaactgcccatcctacccacacccatcactattagagaaaatcgatgctgcagagaaaaatgatataaaatgtagaaatgaaattatatatttcttgaatgtctcagtcattgtgtataaattttatcacccttctccagcatacacacacatgtgcacacactactggggagtatctctctaggttcttctaccacatgtaaggcatacccaagggtaaatcatatggcaacatacacaagtttctatattttttctattagctttaatattaatagaattttgtgtgagtatatagcaacttctggttgcctgtagctatctttactgaaatattccatcatatcttcaccatatcacattaacttaaataggatctcttttccttttatcaagtatagtaatagctaacattagtgagtgtttattatgtatccagcactgtgcccatatgtaatactttgcaaggatcaatgtgctgtatatgaggaaactgcaagttaaggaacttccatgtatactttgaagttcattctcttaaataaggaagctatattgccttccactgccttgcatttttgttttcagccctgtccttcaaaaccttactgtgtttgtgtaaattctgtcttcccatgttccttctcccccactcccttgtcccatttggttttctggtccttctctgttgcatgaattctatttccctccttttattgcctgaggtctttctggcacactgattctctgagcctgttcttatgctcctctttccctcccactctttgcccttttgtcattggcagcttcttacagattcccttgctgtttttattttctctctctcagtccaacaaagactgcttataaagagcagtgaccttgtcatttgaacaaaagattccaagaaccctgtgtaggttggttattgatttgcttaactgaagaaactgattagctacttcatctgttgttgagtatctctattaatgtcagggagttacatgttacagtattagtagctctgacagtgactgtcttcaaattaattttactgactgattttatctcagagttcttatctatagagtgatcactataatacctcccaaaaggaaagataaaatccctgaaagtgcattaccttagaggcttattttaaaacaagttttatttttttatttcacatttttaaagttccaaattatgcttggaaaagataatatcatttaggcctttaagttttttttagctttgaattcactgatatgtatttttcatttagatttgaaatatgataattgagaagagtatattcaacaaaagaagagtgaagtaatatatgaatgtatatgtaaacctaactacatatatttatagaaatatgcatatgcttccataaatattaaccatacgtgattatgtttgtaatattcacatattgcttaggaatgctaattaattaaaaggtcttgttgaattcaaattggttttacaagcttcattttaatgatttgttattattactgtgcgactttgaaaaaccaggtctattgaacttatggatatgggaaatacatatatttaaactgaaacaaaacgttattttatttttattttttattttttatttttttgagagagttttgctttgttgcccaggctggagtgcagtggtatgcgatctcggctcactgaaacctctgcctcctgggttcagataattctcctgcctcagcttcctgagtaggtgggattacaggcgcatgccaccacgcccggctaaattttttttttttttttttgtatttttagtaaagatggggtttcaccctattggccaggctggtcttgaactcgcgacctcaagtgacctaccaacctcggcctcccaaagtgctaggattacaggtgtgagccaccgcgcctggcctgaaacaaaattttaattgtgactttttagcattactttctcctcaaaaagccaagaattgactctttgatatgttatctagtgaaataaatttgatattattttctttgatttctgtagagaatttttgtttatagtttaaattccttttggataacattaggaattattttaataagtagagtaggttttctaattattagtaagttgtaattatttaccccctcattttttttcaatcttacaaaaggccaaaatatcacaatgaacatatccagtagaactggggggaaaattaaaaatgagtttctttatgcaaaattgctaccacatataatgcattatgatatggggagtggcttacagttcatatattcttatagtttatatattcttgattaaatcttttacagaacttagaaatttaagttaaaaacacttaaattaaaaaaatttaagttattttatgtggattaattttaaaattaatagcatagtagaaagatgattgtaatcttcaaagattttcaaattagtgtataccgttcatatgacttagaacatttaggaaaactacaggtatattttggcatagaaaataacaaaatgtggattattgtttttacttttttgttggatttcaatttgatgtttacaagtattgaggttattttatatagtattggaaagcttggatacctagaaacatggattcttagtggtgggttttggcatcaaacacacattggcctgagtcagagcttcatccatttcaagcaatgttaccttgggctaccattccgagcctcagtttccttggttatgaaatgggagtgatggcaattatctcaacgaattattgtgaagatgaaatgataagatgtttagcgcagtgcctggcacttattgagggttggtaaatggtagttgttgctaattgtagcaatgacaacagttctagtgttgtatagtgtgagaaaataaaatcaaatctgaaacatatatcacatcactttcatagctttctctctctgttttcaatttctgttcctgggactctcttttaagttcatatattataatgttattaattttagaccctaataacttctaaactgtttagagtcatagttatgtaatcataaacttttagagctgaagggaatttggggatcatttagtccaaacctcttattttacaagaaagaaaattatgtttggagtagtgaagtgatttacccagtataaattacttgtggcaggcttcttcttttttttttttttttgagatggagttttgctcttgtagcccaggctagactgcaatgatgcgatctcaactcactgcaacctccgcctcccgggttcaagcgattctcctgcctcagctttcagagtagctgagattacaggcgcacaccactacgcccagctaatttttgtatttttagtagagacagggttttaccacattggccagggtggtctcaaacttctgacctcaggtaatccacccttctcggcctcccaaagtgctggcattacaggtgtgagccactgagctcagccggtgggtttcttataagtggaacgctgttcattgtaccacatactggccccctcaatgtatcattcatttaaagtgtgaggctctgttagtttgatttgttcacttgagaccctgttatgcactgggtactgtgcatgaaatgagaactataaagttcctaccctgcagatattcatagtgaaaggaactgattgacaatcacagtagtgtgataagtattatagaagtagggtatagtaaatacagttaaacgaaaacaaagggataggaaccgtagtttattaagtgtctatatgacaagtaactcccatacactcatttaatgccataaccttctgatatagatattattatccataatttcttatttcatagcaaagctcagctcctgattgagaaggaaggaaggaggcatggtatccctgagttccagtaaaaaactcagtgctcatgaggacatgggccttctataaaagatttggtagatattggttgataattaaatgggagtgatgaatcattgagactgtctttttacctgccgctgacattaaagaccaagttgctttttttgtcatttgttttttacaaattcattgccttaattgagtagaagaaactaaacattttctaatttcttaagagaataaccttagtgatctaaactgaggaataagcatttcctgttgtaaatgtacttctctcagttctcttagtatttctggagtcaaaaatctagggcaaggccaaaagcttgggaaagacacagaatcttccatgccctctgagaccctacattttctaaacttaacttgattttctcactttgtttactctttttttttttttttgagatggagtctcactctatcgcccaggctagagtgcactggggccatcacggctcactgcaacctctgcctcccgggttcaagcgattctgctgcctcagtctcctgagtagctgggactacaggcgacctccttaagcagagagggggtttcaccatgttggccaggctggtcttgcactcctgacctaaagtgatccatgtgcctcggcctcccaaagtgctgggattacaggcatgagccaccgtgcctggcctcactttgtttacttttattacttgcttttctcctgctatgccttcgtaaaatctcttagttgcatcactgatgggcatttaaggcattgtgagaagatttagttgttcagtgacagtagtaagttgtcatttttattgctggcttaaaaaataatttttggaagagctgccatgtactaacagtccattgcataacactttactttttgtttttttaaagagatagtatctttttattaacatttttttaaaaatccataacttagtaggtgttagtgtttctaaaacacttgattgctcttggttccaaataggttttcagtggggaaaaaaatacccatttagagaatatttgatatggcatatatgctctctttctaggggaaaatatccttctgggattcttaggatacctgtttttttttttgactttcagttttataaatagagctgacctaggtttacgggtttctttcatttctaaaattctgctgttttactagaactactattatctttggaaactcttaattaaaagaaagaaaaatatataatattaggcagaaaccatgaaaattataaatagaaaattatattaattataatatgcatcagaatttggtgctctttatagttactgaaatgtatataaaaataaatttgctaacatagtgaactttttataagcaacaagtatgcaaaaagttcattaattattataagcagctagaatgccaggcagaatattagcaaccaaatttatattacataggcaataattgacagattcgtctctggagaaactgactattccaaaggaaaagaatcccaaagagctggccaggtcactactccactgacaatgaggcacacccttgaacaaaccccactgaagtccacagagcttctgatcacatttttagttcttttagttctttagtatttaatatataaaatagtctagaattactagattttcaaggaatacctttattgtgaatgaaaaccaaataacacaaaacagaaaaaaaggaaactcaggaaacaactcaagagaaacagagataatgcagaagaaagtacacggtatatatatatatatatatatgtacatatatgtgtgtatatatatgtacatatatatgtgtgtatatatatgtacatatatatgtgtgtgtgtatatatacatatatgtgtgtgtatatatacatatatgtgcatatatatacacacacacacatatatatatttatattccagaatattccagaaattctttcagagaatatgagatgaattagtgaaacttttcaaatgcaaaaatgacacagttactaactctaggaaaaaccaagcttgaacaagaatacataattatagaacattatatggcctaactgtgaataacagatatgtggttataagacaataaatagtgattaacctaaattggagatataatgatattagggtaatagatgtagtagaagagagtgtgtgtatgtgtgttcattcatgtgcttgtgcatacatacatatgtgagtgcagacatgaccatgggcatatgtgttggtgggtgggtaagtgctgtattctcatcttccatgttgcgaagtcagtagataaggggtttgcaaactatgacctggagtccaaatccagctgcccactgttacttcaaaataaagtttcattggaacacagctactcctgtttatttacatattgtctacagctgctctggtgccactatggcagagatgaattgtcaagaaagaatccatatggcccacaaagcctaagatatttactatctggctacacaataattaaaacaaattttaaaaatcaggaaatagcagttcatcatttagaaatatacatgtaaggcccagcatgatggctcatgcctgtaatcccagcactttgggaggtcaaggtgggtggaccatgaggtgaggagatcaagaccatcttggctaacacagtgaaaccccatctctactaaaaatacaaaaaattagccagatgtggtgatgggctcctgtagtcccagctactggggaggctgaggcaggagaattgcctgaactcgggaggcggaggttgctctgagccgagattgcaccactgcactccagcctgggcaacagagcgagactccgtcaaaaaaaaaaaaaaaaagaaatgtaaatacaaaaaaaatcagttgtgttctatgcagtaataaggaactatctaaacaagaaatgaagaaaacaattccatttacaatagctacaaaaaaattactcaggaataaattttaccaaggagatgaaagacctctacactgaaaactataaagtattgatgaaataaattgaagaggacacaaacaaatgggaatatatcctgtgttcatagattagaagaattaatattgttaaaatgtccatactacctaaaacaatctacagattcaatagactcttttttttttcttttctttttttttttgtgacaaggtctggctctgttacttaggctggagtgcagtggtgtaatctcggctcaccacaaacgccgccttcagagctcaagccatcctctcaacttagcctcctgagtagctgggactacaggtatcagccaccatgcctggctaatttttgtgttttttgtagagttagggtttcgccatgttgcccaggcttgtctccaactcttgagctcaagtgatgtgcccaccttggcctcccaaagtgctaggattacaggcatgagccagcacgcctggccagactcaacaccctttatcaaaattccaataacttttttcacagaaatagaaaaaataaccctaaaacttgttttaggattgtttaaatcttatttgtttaaatcctgtttagaccctgaatagccaaagcaaacttgagggaaaaaaaaaaaaccaaacaaataaaaacaaagctggaagcataacacaacctgacttcaaaatacaatacacaggtataataaccaaaacggcatggtactggcacaaaaacagaaccatagaccaataaaacagaagagagggcccagaagtaaatacatttatagtcaattgatttttgacaactatgccaagaacacacaagatggaaaagacagtctcttcaataaatggtcctaggaaaactggatatccatgtgcagaataatgaaattagagcctcatttcataccatatacaaaaattcaagtcaaaatgaagacttaaatgtaaaacctgaaactgtaaaactactagaagacagtgtaggggaaaagctccatgacattggtctgggcaatgatgttttagatataattccaaaagcacaagcaacagaagcaaaggtagacaaatagaattgaatcaaatgaaaaagcttctgcacagcaaaagaaacaacagggtgaggagtcatcctacagaatgggtgcaaatatttgccaaccatacatctgataaggggttaatatccaaaatatataaggaatcaattcaattgtaagaaaacaacctgatttaaaaatgggcaaaatacctgaatagacacttctcaaaagaagacataaaaatggccagcaggtatataaaaaaatgttcagtgctataagaggaatttgcatatctttacagatttggcagtgatcaaagcaaaagtctgggaaagctctacaagcagaattctcctttgactccttgaggagccttacctttcagattgagaaaagctataatatgatttaaaatccatctggcatttgctgttagattgtgatttttggtaacagcagacagtgtcaggttttattttattttcctagaatcagggtagtcaagaatatttcgtttactctagccagttctttttcacattttggcccaaactttattcccaaaacattatatcggtacatattttaaaatctagcaaacacatgggcatttgtgaagaccttttttttttttgtacaaaatgtgttctgaatttttgcttgtactgaaaaatacttgaaataaacacaggaagttgtatactaaaaaatgctgaacatcactaatcatcaggaaaatgcaaatcaaaaccaaaatgtcacttcacacctgttagaatgactgttagcaaaaagacaaaagataagtgtcaatgaggatgtggagaaaagggaacccttgcacgctgttggtgggaatataaattggtacaaccattatggaaaacagcatggatgttcctaaaaaaattaaaaatagaaccaccataggatccagtaatcccaataatgggtatatatccaaaggaaatgtaatcagtatgtcaaagagatattttcattcccatgttcattgcagtattaatcacaatagccaggatatgtcatcaacctgagtccatcagtggatgaatggaaaaagaaaatgtgaatacataatggaataccatccagcctttaaaaagttagaaattctgtcatatacataaacatgaatgaacctggaagatgttatattctgtgaaataaactaggcacagaaagtcaaataccacatgatctcttacgtgcaatctaaaaaagttgaactcatagaaacaaagtaaaatgctaactaccagaggctggaggctggaggattgggaagatgttggtcaagggacacaaaaatttcacttttataggaggaataagttcaagagatctattgtatatcatggtaattatacttaatgataatatattgtatacttgaacattgctaagtgtatatttgatatttacatattgtctatagccactctggtgctaccatggcagagataaatagtcagaaagaggttatacggcccacaaagcctaagatatttactgtctggccctttacagaaaacaaccttgtgatacacaataattaaaacaaatttaaaaaatcaggaaatggcagtacgtcatttagaaatatatatgtaaatacaaaaatcagttgtgtttctgtgcagtaacaaggaactgtttgacaagaaatgaagaaaacgattccatttacaatagctacaaaaaataggaataaatttaagcaaggaagtgaaagatctctatacaacaaaaaaatgataagtatattaggtaatgcgtgtgttaaatagcttgatttatccaccttacagtgtatgcatatatcaaaacatcatgttgtctacgcattgggtaaagtgtacactgcttgggttatgggtgcaccaaaatctctgaaatcactgctaaagaacttaattcatataaccaaaaaccacctgttccccaaaaactattgaaataatagtaataaaaaaaactcacacctgtaatcctagcactttgaaaggccaatgtggttggattgcttgagctcagaagttcgagtccaccctgggcaacatggcgaaacctcatctctacaaaaaaaatacaaaaattagctggatgtggaggcgcgtgcctgtggtcccagctacttggggggctgaggcgggaggatcccttgagcctgggaggcggaaacttaccttatacaccataattttaatttttacttgtcaatttaaaaagaatttaaggaacaatgtttgaaaatatgagaagaaatagcttaataaattgacaatgttcacctaaaatgagtaagagtctgaagtgcagaggaatgggacagaatactgctgcttttcatttaagcctaatagtatagtactgttttaaaaccatatacatgtattgctttaatacaatttttaaaaattaaatttagaaaattaagaaaaggtagctgttagaattaggcttgttggtgtagggttgccatgttacactgatgcataattcaccaaatactgtatttaaaaataaagtatcagagataccatggaaaaataaacatatgttaaaaaaataccagtaccttcaaacaccctattccctatagtatcaattttttattatatgctttttgatataactgtaataggtaattgatgcaaataacctccatctcttattttagtattattagtggtttcaaaacttcatatagcaacttctttttaccatagctgctaatgagaagcaaaaaagaaaaaaaatcaaaccaaagaaaattgatttactatcttgtcacactcttttggtgatggtaataaaccagaggagaaaaaaattaaaggagtagtgaattggctcaaagtgaatcagacaagtacttctgagggtcaatgaaccctaaaacctgatggtagataataaaatattgctgaattttgatttactattaagtatctttaatgtactgtgttttatattcaccaaacagagttatcttttcatataatgcaagatttttaaatgtaaaaaccatggtttatttcgttttgtattctctacagggtagtgtttggactcagtaggtgcccagtaaaggcatgctttaatatgaatggattttcactactgagtagcttgttctggttgattttcaaaagagtcttaaatttgtaagtgaataaaaaattatatgagtattatgagtgttcaaacaaatggaagcatttcttttccctgatttcgcataatgtgtatgatttgtgctaagtgataataaagacccttccgtttttcactcttggaagagaaacccttatcttctctacaaacaatttcaggttgttgttgctgtaaaacaagccctgagacctgttatcgactcattgttattttttctattttccaccatcctgtgagagaacatctttttaatgtggttttatacagtcttcagtgtgtctcagatatgggtttagtaaatctgttaagtacttttgtttgtcttctgttttttctctgaacaatacagttatgcaatttcctttgttattaaatgtcaggattattttcttatttatcaaccctgtagttttcaatcatttctgccatgttctttttggaagactgttgattgctttttagctaaatggtaccacagccagagaaaaagtggctaagatctgatgacatttgatgaattggtatgtcatttgcaattgtgtattctacccagttccctatttgagagaggtgttttctcctggaagtgctagagaaattgttatagcataattccttagaaaaattattcatagtaatgtatccgtgagacacatctagaccagggatatctcatggaaatgattgtcctttctgaacaagtgccacatgtttttatttgtaaacttattttcttctcatcctggaaataatgatattaaaaacattgtgtgactagtgatctatgactctgatatacaaacaatgcctattttattgtttctgtataataagcaagtcctgttgtgttcatttagctagaaatgaaaaaaaacccagcacacctgcattttgcatttaattaatttatggtggtgtagtattataccgtcttttaaaaactactggcaaattttaaatgtgcagtgcactatataaataggaatgagaagagtctattcatggcaaggtaattagagcatctttggctagaatatctctgagtaaaaatagctagtctcaatgttggagtaaggtaattaagtcctgaagaataatgatgaaaaccttttgctcagataccctttcttcatttaagttcaatgccgtacattcaaataaaatctgtgtaatcaaactagcccattaagtactactgagtgagataaattgtaatacctattctatatccttgcaaaagggaaatgcatgttatctagaaacataacagcttataaattaaaaacattcatttttcttctcttttgtcttatatcaactttttgtatatttatatacataatcacctaactcctacctcctcttctttcttccttcttcctcaggtaatgtacaataatacattatagtaaccaaaatcgagattgctggattttttttatgttcttagctctctgacaaagagagcttgcttgccctttttccccccaaatcttaaatataggcatctttcaatgagttgtctcagtcccattttttccccctgtaatccatgccttggtaaacctttattcctaccacaacactttatgcagtgattcccaaacatatattcctggtcaagtctcttggactccaaaattgtatttccagctgttgcctggatttctatatttgaaatgtaatgacatcttaaactaaatgacttcaaagtcaagaatcattctctagtccatctaatcatcccacctcctcttcacacagccttcactacctcagttcatgacaccatcagtcacttttgaacaacttgccgcattttacacatccaactaaagtcatgtccgttctacttatgtaacatcatcaaattcatctccttcattctgttctcattgcccttgctgaggttgaggcccacatgtcctcttgccaggagtatagcagttgctcttgatcttcacgtgctgcttcaccagtccattctacccacagttcatagatgtgctttcttaagaactggactggtaatgccattactctaaaaacttccactggaccttcgctgcctcttaatctaagaccagaatttttagcttcatttgcaaggcctgtcccagtttagctctttagcctccttttgcatatatgccatactctagaaaaatggaatggatttttccccctcagatacgttatgttattttccatccatatgtcttttcataatacgtaaccttcatgagggcaatgattttcttttaatctgttttgtttactgttttatccgtagcaagtaaaacctatatgtcacacgtagcaggtactcagtaaatatttgctgaatgaataggtaagtaaatggatagaagaagaattggaagatacatttcatgagactcacctattcctttctgactttgggttctgagcaagagtcctgtatcttctcagtaagttttctttgtttatgctaacttaagtgaattatattacttctaatctaatgatactttactgagacagcataaaaaagttagaatggcaacttggatagagggacttggtttagagacctgtttcattttgaaaaggtttctctcagctttgctttgtcatttacatagtataaatgaacaaaaccccactcaaaggtcagatatcccacaacccaaacatgtactgaaggaagaaacatcctgctttaaatggaacaacaatactatgtttttggctgcatgtaacaaagaaatttaataagagagtcatgtattaattacagacatatttatcctaagatactaatttatatactaattagttgattttcaaggcaaactaatttggttgtttttcaggccacaataaaactatccccaatattttgtatccacattcattttcttaataaatgaccaaaactttaggcaagaagcaaaagcagaatcatgatgaaaatgtgatgtcaaaactttgaagttttaactactagttatgtttcttaaggaatcaagacctgagatgggggactccagattcataacctgataaagtattttcaggtttgaatagatgtttgaaacacctttaaaagccaactacatagcttcagttatgtggaagaatgtgatagataaaggacagcttagattttaaaaacaaagtcaagaaataaatgtgtctataaggtacataaggctacagattaagaaggatgagacctgtttctttaccaaccaaacacttatgcagagatatatgttttcagtgaaacataggtgctgataaatatgcaattttctttggttataaaagattctaaggctcataggtattgctgaatgtttataattaagtaagcttactctaagaagcatgaatttagaacacaagaaactaaaataaattaagccataatttctgcctaagagaaattaaaagttcatgctttttttcatgactactggagtaattgtaggtatactgagcatgcttctttcatttgatttaattttgactctatcaatctatgccctggttaaaactaattctctcctagtgggcttttcttttctttcttttgtttttttttttttgagatggagtttcactcttgttgcccaggctggagcgcaatggcgtgatcttggctcaccacaacctccgcctcccaggttcaagcaattctcctgcctcagcctcccaagtagctgggattacaggcatgcaccaccacacccagctgattttgtatttttagtagagacggggtttctccatgttgaggctggtcacgaactcctgacctcaggtgatccacccacctcggcctcccaaagtgctgggattacaagcataagccactgtgcccggctgtgtccttttcaatagcatgtaattttcttacatattgtgaagtgttttagatgattttttccaatcctttatttatttaatattttgcttgataaagtataattgtacatattcatgggggtacataatgatagtttgatccacataatgtatagtgatcagggtaattaacatatccattgtctcaaactagatgatttttaatgaataataaactgatcttatttctaactagttaggaaaaacaaagaattcttcattatatttatgcacaacacaagggtacttatgagaagataacacttaccatctgggacacaacatttctaccctagtattctattcatggtgatagctaataactgacactattctcagggacagtagcagtggtagtattgccactattatagcccctactctagtcactgccttccagcaaacatgttcttgttatatattttccaattaacacttacataatgtctgaaatgtatggtggtaggtgttttagcctgttttacttcaaaataggaacgtaaggaagataaacatatacataagaagtgagtgtttaagcccatactaaaatttacatgttatactttagcacaacaccttcttcgaagtaaaggggacaactgaaatgtatcatcttgccatgtataaaaaggcatgtttcaaagcataatgaccacactgtaagccttcactctttctctaatcttctttaaatttgcacatgggtaacaggtcagacattcagaatagtgtagccaggtaaatcagaattttcattatctggatttgtatgcctcactgggtgcactgggggaggcctctatgacaagcatgttaaatgtgtacttttctggagcccaaaatgctgaagacattgctttagcctaggtaattcttctcagagaagaataattatttacacatgtacacatacaaaattatatatgctgttcaatatatgttttaaataaagagatatacatacaaattttctagctcttgcttacatttttcatctatagtgctgtaatgcaatgaaattaagcctctctggtaactgcagttctccctgagaataagtttctgttatagtaccattatgctagagggtcccacatatgcctgaaggaaatactttatgacagttgttaatattatagccaaatgatgcttttattccaatttaatcattcataaaaggcacaaatagcacctagtaagtactttcgtttatattttcccgtgcttttaaaatgttgattctatagcatcactcaatattaatataattttaagtattatttacttgtatttggtttgaaatataatgtctgccacttaatggattatttactacctgaaaaaataaactttgaggccagatgcagtagctcacgcctgtaattttagcactttgggagaataaaattgctgaggcaggaggaacgcttgaggctaggagattgagaccagctggggcaacatagtgacaccctgtctctacaaaaattaaaataaaaaaaaatagccaggcttggtgatacatgcctgtagtccagttactccagaggctgaggtagaaagatcacttgagcccaagaggttgaggctgcagtgagccatgatcacaccactgcactacagcctaggcaacagagcaagacattatacccccaaaaataaataaataaaatttgagcctagtagttgttgtcatttgccacttttctagactaaatcattattataagctataccatattactgacatgttttgattaatgtaacaaatgcttttccagcttaacatttttcacagcttattttgatatggaatttctcttaatgttatagtaacatctaaaaatagttttatttagataaatttctttaaaatgtatagtacaaataacatctttgttagatctgtaactaagaggcaataaatttgaagcacactccatatgagaaattgtaaagccaaactaacaaaatcgtgattactttgggatgacacagtgtcatgaaagtcaagaggagagtatcatgaagactgaaaagtgatagcactgaatgctgctgttcttttaaagatgaaggttcagctatcagagcaggaacctaagggcaaaatctgaaattaataaatcaagaaatagcaatataagcatatggctatttaggaataattattactattagataagaagttgcttctggaaagaggactcatgacaacaatggaatcatgggctgttttgtgatactggatttttaaatcatgaagcatgtgttatattttaagccaaaaaaaaaaaaaaaaaaaaaaactggggagggatcttcgtgttggtaggattcgttttccacctttaaaaatttaggtaaggaaagtgggatagaagccagactttaaggagacaagaaatggaaaggaagtagaacagcagccatagactagttcctcaagaagcttgacctgaaagagttatgtatcagttaaagaccatgagatagaggagggtaatctgctgtaagttataacttacacagtttgctgatttttatcatgaattaaaaatatgtacttgtttaaacgttgcactgccatttaccatttgctaagtagatgcataagaacattgaggccaaaattacagtcccaggagcctcagtttcactgtggagttttccctcagcaaatgtttgcttttgcttgtccttttttcttagctaaccttggtttctagatcaagatgattttccttctttgttttcacacagcatattcaattgcaccacactctttttaatcacaattctttctgatgggtttttgattggatccaaatttgcaggctgggccctgagaatctaattcagtctgttgcagtacttctcaatcattttagtcttagaactgctttatatgcttaaaaattattgagggccctgataatttttgtttttgtaggttttgtcttttgacattttccatattagaagtcaaacctaagaaattttaaaaatgttctttatttaaaataacattattcatcccattatatattaatataacatttttctgaaaaagttactattttccagtatcaaataattgaagaagagtgtatattttttccaattaaaaaaattctcttagcaattttcaatgcgttgttatttactatagtcatggttttgtacaacagatctcttgaatttactccaactgaaattttgtatcctatgaagtagttactataattacagataatcaggaaaattgacaaatattaagaacaactctcattcattcaaaatatccaccacttttgggaagtaaaattatctgctcttgtaataaaattagataaaatcttaaaatcaattagatagtacttgagctattacagctttgaaaatgtgtgtccctgtgtttgtgcatgcacacacactgaagtataatttattcagaaacagggcttgttcccacttggcaggagtgttgattttctagcttatctgcagtttgaggtaataagtctaacaagttttgggagatcttaagtattatactgtagtttgaagactgatttgttacatttgcaaattggttggtttccacatacagaccttaatacacctacctgtgttagttactttctaaatgtttgttattgctacaaccatacttacgtgtttcattgaattacaagttccttaagaacagtgatggtattttaaaaatcaggagtagcccaccatgactaggtatatggtattgaagtgctctctgcatatttactgacccatagttggtagataagggttactataaatagaaatagtccgccttattgccgataatggtggtaaaggcataactctggaaattatttttatttttaaaataaaaatgatagaatgagcactctatcttaagttgggtcctactatgatatttgtaacttagatcacttggagacatttcttaggtaccggctaattatttgttaatcaaaataggagccaagcttctaatagaagtgtgtaaaaaacagtaataatgatagttcctggaaaatcacttgcaaatattcaactgcaaaataaacttaagaacttttattaacaatatagattattatgaaagtcaagggatgaaaactgaagctctacacacacacacacacacacacacacacacacacacacacacacacgctttgagatagggtctcgctctgtcacccagactagagtgcagagtggcacaatcacagctcactgcggcctcgacctcctgggctcaagtgatcctcctccctcagcttcctgagtagctgggactataggcatatgccaaatacatctatacatgtaatttccagagttatccctttactacaattctcaccaaaaaatacaaaaatgcgactaatttttgaattttttgtagagatgggggtcttcctatgttgtctaggctggtcttgaactcatggcttcaagtgatcctctctccttggcctcccaatgtgctggtattacaggtgtgagccaccatgtctggccctgtctttttcaatattaatttgaagaacatccttgaatcaatgactattacttgaatataaaggccaaatttagagtttatcaagactcaatagataattacagtagataatatttactgagtacacactgtgtgccaagcactgtgatacatactgtatgcattttcacatttaatcctcaaaacaagtgtgttataattagggcttagcaaggtttaataactattcctagttaagtggcagagctgagagttgaacccaagaatttgaacggtgatttttaagaaattattgatgttgggaggctgaggcaggagaatcgcttgaacccaggaggcagaggttgcagtgagttgagatcgtgccactgtactccagcctgggtgacagagcgagactctgtctcaaaaataaataaataaataaataaataaataaataaataaataaaataaattattgatgctttgaaacgtatgttgttaatatagtcctgtattcaagtgttagcacacaattattttaaaatgtggagctcatcaattattccaaagagaaacttgttataaagtccctaaaatttcactaaggggaaaagctcagatacagacgtgaataatatttcactaagatataagattattagcatgaatgagatattatggggatgcaatgtaacttaaccatatgttattaaaagtgtttttattacattgatgagttatacattcatgggaagtatttatttcatatgttttgtagggagaaatttaaaaggatttggttaaatcattttgaggacataatttgagagaaacataccttttgcaatatttttatatccctgaaaattttttgttaaaagactccatctttaagagagctagagattctctcctggaaagtgactagaccagtgataaaacattatagatctggagtgaacaaattatatcactgcagttctaggggggctattgatataatttctagaaagggaagtttaaaaaatgcctgtatccatagaagtagattctgtagaaatacactgtagaagtacctgttaaacttctcccttccttattatgaggtaaaaaaatcaactatagctattgaatgtaaatgctatttgattatagtagactcttccagatgtaccccattctactcagtacatctgtttctttcactaagcaatgtgttccactcctgaagaatgtttgtctttaatgtatcacattgaaattccttcttattattttatacctttacacagttgatattgttttggttgttattttgcattgacatagttctttatattttcagtgacatcgttctttatatatgcttgttaacatttggcagttaagcatattactaagtttctttttaatgtttttaaagctagttaagagttttaggaaaaatattttctggtgtcaatggatacagaaggttaaatcatttgtctttgtcttgaaagacttaatcagaattgatatcattatatcagtggttttcaaccatggtcgtacattaaaatcgcctaagggaagttaaaagcaaacaaaaatgcgcattaaaaaatgaaaaccagaaaacaatgccaggacctgagattctggtcatctgagattctgatttaagttgtctgggacaaggtccaggcaagagtatgtttaaattactgcccaggtgtttctgatatgtgaccaggtttgacagtcacaggattgaactatccgtataaagcctccctcagtatctaggggggattggtttcaggacgcccacagacgccaacctccaggatgctcaagtctcttatattaaatggtgtagtattaacatgtaatctacacacatcctcctgtatactttaaattatctccagattgcctataatacctaatacattgtaaatgctatttaaatagctattaagtgtatttttgtttgtatttttattgctgtattgttatttttttcctgaatattttcaatcactggttgattgaatttgcagatgcagaacctatggattggagggtagattatattctgtgttcatctcctcttgggtgttaaatatacatttagtacagccatgttgtacagttcaaggagatgctgttcacattgtgttctatatgaatggcacttccttcaggaatgaatggtgccttctggaagttggctgctagttgtataaataagctaatggcttcagtaattgctgttagaggaatatgcattatggcagtagccttcttcacttccggcgtacaaatgattgccttgacagtcactctctatttaaaactggtcagatgtatataacagcaagaccagaaaaagtttgtattttacagtagctgaggatttcaaagttcccaacaggaatgatgggagctgtgtatgaaattaaaatttgcttgaggtttcagaactaagagcatgggaaatggttcagtataattttttcatcattgctgtttatggaagtattatggaaagctgattgcattaggcagggttccctagaaagacagaactaatatatatatacacacacacacacacatacacacacacacacgttatatataatatatatgtatatactttttgtttgtatttttgtataaactcccatgtgtaaatatatatatatacacacacatacatatatatatacacacacacacacatatatatatatttatgtatatgagtttattaacttacatgatcacaagttcccacaacaggctgtctgcaagcttgaggagcaaggagagtcagtccaagtctaaaaacagaagaacttggagtccgatgtttgagggcaggaagcatccagcatgggagaaagatgtaggctgggcggctaggccagtctcaccgttttatgtttttctgcctgctttatattcgctggcagctgcttagattgtgcccaccagattaagggtgggtctgccttccccagcccactgactccaatgttaatctcctttggcaacaccctcacagacacacccaggatcaatactttgcatccttcaatccagtcatgttcacactcattattaaccataacatttatctttctaaaatagaacaggaaaatatccatgattataaaaagagatgcctcattaaatgctattagaataaagaatacatggtacatctattgagtctcttgctaacatgacaaacatacattgctaactgtgcgtaggttctttacattttaattaattatcagtgatgtaaaaatcactggcctttaacaacagtttgatttcaaacccattaaagaggctaaggcaaaaatgtggctttagtctctcagccccattgtgtattctttactgtggtgaatatcaaaacagcagttaattatagtagtaccatttctgttcttcatttcattatctctgtcttgcactattattttttgttgctgctggctatacagcatcaggcctggcaccagcgaagtatgaacacaatgccagcactgcattcagcacaagaatagaaaggcagatggcagattttactatttatagttgtagccaatctgcctgaggtgagccctgccgaaatggttcttatcaagaatgttttcatttattaaagggataggaaatgaaagccaaataaaaagcctcagtcctcaggactctgagagcaaaactcttgctatagattgcaaagcaattccaagtattgactagatatttatgaactagaaaattatatatttaactctctagtctcaaagtaaagacttcaggccagcagtgacttcacagcagaacttgaggaattcattgttcagtgaagttgtgctgccatagcaactgatgcagagtgaattttaattattaagatcaaaataggcttatgataaaaactatttaacaacatcaaatatataaactgaattgtttttactttctcactaatcatttcttgactgctatagaaacagcacaacataactctacttcacatttgattctttatattgttttaaaaaattcattgtttgaaactccagtaaatattttagaatatcaattagtatgttgagataaacattgtgttcaaaattaaaatggcgtgtgaataatctagctttcttatcctctagacatctgatttaaaaagtgttttagtctcggctgggcatggaggctcaggtctgtaatcccagcactttgggaggctgaggcagggagatcatgaggtcaggagattgagaccaggctggccaacatggtgaaaccccgtctctactaaaaatataaaaattagctgggcatggtggtgcatgcctatagtcccagctacttgggaggctgaggcaggagaatcgcttgaacccaggaggcgcagtttgccgtgagctgagattgcaccactgcactccagcgtggcgacatagcgagactctgttgcaaaaaaacagtgttttagtttcaagaacatattgtggtgataactaaaacaccgtattgaagaacccaggtggttcatgtaatctgaaatatagcagtgagttatgatagtggctaataaaatttatattccacagaaaataaaaaccttaattataggctaaagaaattaatttgattcaatcatagtaattaaagaaaaatattttgattggatgtattggaatgtagcagattatttagtaatattctaaattattgcaaagcatctgttcattttaaatcatggtaaaatctgtcatgtgagtttattgattttatttaaatgaaatgattagttgattggaaattttcattttttcaatggcttatactttgatagaagaagcttatagaaaactagttttggaaaggtacagctacaatctaaatttagaatcagattttttgcttcatgaattttatgttccttttcaaaatatagcaaaaaagcaaaaaggacttctggttagatacaaagatatgcagatagcttaggtctttcccaatgaccctccaaaagtaaagaagtttttaaataaataaaattgcaagggcaaagaaaattagcgtggagataagtaataaaatttggaagctggaaggcaggtggatgagtgctaactaatttagacctgaggaatctcaattataagtttgtagtggggaaaactgacaaaaatctgatgtatatatcagcatcttatacaactcagaaattggaaacactagggccttttggaagtaggagttaaagtggtggctgggtgcggtggctcacacatgtaatcccagtactttgggaggttgaggcgggcggatcaggaggtcagaagttcgagaccagcctgaccaacatagtgaaaccccatctctactaaaaatacaaaaattagccagatgtggtggtgcgcacctgtaatctcagctactcaggaggctgaagcaggagaatcccttgaacccaggaggcggaggttgcagttagctgagatggtgccactgcactacagcttggacaacagagcgagactctgtctcaaaaaaaaaaaaagtagtagttggttttcaagatcccatcctcctcatacagctaggccgtcatacagtaaagcctctcctacttggcagaagactaaaggcatatattctgtagagggtaaaatatagttgccaggactgtggatattgcagaacagcagaaggcagagggcaggtgtataaggccattcttgcattgctataaagaaatacttgagtccagacacagtgactcaaacctgtaatcctaacactttgggaagcctaggcaggtgatcatgtgagctcaggtgttcgagactagcctaggctatatggcgaaaccccatctctacaaaaacttagctgggcatggtggcatgtgcctgtagtcccagatactcaggaaagcttagctgggaaattcacttgagcccgggaggttgagaccttgtctagaaaagaaaagaaaaaagaagagggggaaggaggtgaggggagggagacgagggaagggaaaaaaaagaaaaaagaaaagagaagaaaaatacctgaggctgtgtaatttataaagaaaagagctttaattggcttacagttctgcaggctgaacaggaagcatgatgctggcatctgcttagcttctggggaagcctcaggaaacctacaatcatggctgaggtgaaaggggagcaagcatgtcacatggccagagcaggaacaagagagagaggtgggaaatgccatacatttttaaaggatcagatcttatgagaactcactattgtgaggatagcatgaagaggatggtgctaaatcattcatgagaaatctgctcccatgattccatcacctcccacctaagcctcacctccaacactgaggattacttttcaacatgagatttgggccaggatacacatccagacgatattagctggtgaatagtagattgaatcagagatagtacatggaatttttgcctgttgagtgttgagacttcagtcttctgttagccctcagcatattggtaatcaagtatatataatcaaggcaagagaccagaagagttttctatgccaaatttaagaagtccaagaaagaaagacttacaaattccctgggagttccccagggatatagctcagtcacatcatccttcaatgaacacaactgtcaacaagccctgtccgttctactggccttccacttagcttccacttagccctattcttaaatatgagcatacagccaaatatcattaggcattggaagacagcatttgacttttttttagagaccaaaacaaaaaaataaaaacaacttgaataagactatgcagggaagagggaaaaaaacaaacataaaaagaagctaaactaaaattaatatctggggagatgatagaaaatgaaacaaaatgaagatttttaaacatttcttttattgattcataatatgttatgtatttatggggtacatgtaagtatttttacatgcataaaatgtgtaatgatcaagtcaggatatttagggtatcatcaccttgacaatttatcatttctatgttttggtaacattttaagtcccctcttctagtggttttgaaatatatgataatactgttgttaactatagtcagtgtagtctaatatctagtgttagaacttatttcttctatctagctgtaggtttgtacccattcattgacctctcttcatttccacctcccaccatcacgctcttccctgcccctggtacctcattctattctcaatttgtgtgagatcaagttttgtagctttcacatatgagtgagaacatatggtatttatctttctctacctgggttatttcacataccataatgacctcctgttacaatcacattgctgcaatgacaagattgacttccttttatggctgagtagtcttccattgtatatatgtacaacattttctttatccattcatctgtcaatggacagttaggttgattccatatcttagctactatgaacagttctgtgataacatgcaagtacaggtatccctttgatatactgacttcttttcctttggacagataaccagtagttggattgctgaatcatatggtagttctattgttgttgttgttgttgttgttgtttttttaagaaatctctataccgttttccatagtggttgtactgatttatattcctaccaacagcgtataagagtttccttttctccagatctttggcagcatctgttatcttttgtttttttaataatagccattctacctggggtaagatgagaactctttctggtttcgatttgcatttccctaatgattagtgatgttgaacatttttttatatacctgttcgtcatttgtatgtcttctgttgagaattgtctatttgtgtcatttgcccactttttaatgggatatttgttttttcattcttgagttccttggatattctgaatattaatcccttgttgaatgaatagtttgcagatattttctcctgttcaacaagttgtctcttcactatgttgattatttcctttgctgtgcagaagcttattagtttaatatagtccccttgtttatttttgttttagttttttgtgcttttaaggtcttagctgtaaaatctttgcctggaccagtgttctgaagtaatttcactatgttgtcttctattagtttcatagttttgggtcttacttttaagtctttaacccatcttgaattgatttttgtatgtgatgagagataatggtccagtttcattctttggcatatggatatccgattttcccagcaccatttattgaagagtgtgtccttttcccagcatatgttcttggtgcctttgtcaaaaatcagttagttgtaaataggtggatttatttctgtcttttctattttgttccattcgtctttttgtctgttgttgtgctattcccatgctgttttggttactatggtcttgtaatataatgtgatgtcaggtagtgtgctacctccagctttgttctttttgctcaggattgctttggccatcctggctcttttttggttccataaacattttagaattctttttactaactctgtgaaaaattacattgtaattttatagggatcgaattaaattttagattgctttgggcagtatggtcattttaacaatactaattattctgatccatgagcatgggttgtctttccatttgtttatacccttttcaatattttccatcagtgttttatagctttttttggtagagatttttcaccttcttggtcaaatgtattcctaagtattttattttactttttagctattgtaaattggatttccttgatgcttttttggctatttcattattggtgtctagaaatgcttccgatttttgtttgttgattttgtattctgcaactttactgaatctgcttatcaactctaagagattttttgttggactcttttagtttttctaaacataagatcatgtcatctgcagagagggacaatttgacttcctcacttccaatttgtatgtcttttatttatctcttgactgattgctgtggctggaacttccagtactgtgttgaataggagtggtgaaagtgggcattcttgtttcattttgtagaggaaaggctttcaacttttttcggttcagtatatgttagctatgggtttgtcatttatggtctttattattttgaggtatattccttctatgcctagtttgttgacagtttttatcatgaagggacattgaattttgtcacacttttttctgcatcagttgaaatgatcgtatggtttttgtctatcattctgttgatgtgatgtatcacactgattgatttgcatatattaaatcatctttggatctctggtataaactccacttgatcatgatgtattatttgattttcgtttccctgatgattagtgatgttgaacattttttcatatacccattggtcatttgtatgtcttcttttgagaattgtctattcatgtcctttgcccatgttttaatgggattatttgtttttctattgtcgactgagtttcttgcatattctgggtattagtcctttgttggatgaatagtttgcaaatattgtctgttgtgctgttgaattacggtttgctagtattttgttgaggattttacatctgtgttcttcaaagatattgacctatagttttttgttgttgttgttgttattatgtccttgtctggttttggtatcatggtaatgctggattcatgatatgagttagggaaaatttgctcctcttcaatttcttggaatagtttgaggaggattggtattagttctttgtgtgttcggtagaactcagcagtgaatctctccagtcccggcttttctttgttgggagacattttaattattgcttcaagttctcgttactggtcttttcaggttttctgtttcttcctgattcaatcttggtaggttgtatgtttctaggaatttatccattttctcttaagttttccagtttgttagtgtatcgttatttataatagtctattatgatcttttgtagttttgtggtatcaattataaagtctcctttttcattttttaaaaatttgggtcatttcttttcctggttagtctagctctagtggtttatcaattttttcttttcaaagaaccaatttttcatttcattgatgctttatattgcttttttagtatctattttgtttagctctgctcttatctttattatttcttcctttctaccaatttgtggtttggtttgttcttgctcttctagttccttgaggcatattgtcagattgtttatttagaatctttttactttttaaatgtaggcatttattgttttatatatctcacttactactgcttttgctatatcccacacatcttggtatgttgtttttccattttcatttcttgcaagaaatatttgtatttccatctgaatgtttttattgacccagtgtttgttcaggagcattttgttcaacatccctgaatctatggctttcaacattcctcttggttaaaacttctagttgtatttcattgtggtctgagaaaacatatgatttttattttgtttttttttttttttttgagacagaatctcactctgtctcccggaatgaagttcagtggcacgatcttggctcacttcaacctttgcctccctgattcaagcgattctttgcctcagcctcccgagtagctgggattacaggcacctgccaccatgccccgtgaatttttgtgttttgagtagggactgggtttcaccatgttggccaggcaagctggtcttgaactcctgacctcaggtgatccgctgcctcggcctcccaaagtgctgggattacaggcgtgagctaccatgcctggcctatgatttctgtttttacaaatttattgagacttgttttgtgccctaacctatggcccatcatggataatgttccatgtgctgatgaaaataatgtctattctgcaatttttggataacaatctctgtaaatgtctgttaggtccattaggtctgaagtccagtttaaatccaatgtttctttactgattttctgtctagattatttacctaatgctgagagtggagtgttgaagtctcccactatcgtgttggagcctctgtctccttaggtctaataatattttatttatgaatgtgggtgctctagtgttaggtgcatatattaatatatttagaaccattatatcctcttatcctcctcctggaataattactttatcattatatacttgtcttttttttttttttttttaccttattttgactcaatgtctgttttatctgatgtaagcacagctactcttgcttccttttagtttccatttgagtagactttttccattccctttactttcattctatatgtgtctttacaggtaaagtacatttcttgtagacagcaaatagttaagtcatttttttaattcattcagtgagtctatatctattaagtgaagagtttaattcatttatattctaggtggttattaatatataacattttgttgctgtcatatagtcaattgtttttggttcttttctatattttttgctcctttctcttttcttgtttgtcattgtgttttggtggttttctgtagttgtacctttctcctcctcatttgtgcttaagttttaaacatttgcgtattttcatgatggtagatggttgtcagtttgcttccaggtttaggactcccttgagcatttcttgtaggtctggtctggtggtgatgaattccctcagcttttctttgtctgggaaagactactttttcttcattttttaaggataattttgtttgctatggtatccttgactggccttttttttttatttcagcgcttggaatacgtcatcccattttctcctggtcagtaaggtttctgcaaagaaactcattgttagtctgatggttttttttttttttaattataggtgccgaaacacttttctctttttgtttttagaagtatttctttgtctttgactttagacaatttgactataatgtgctatgaagacctttttatgttgtatctgcttggggatctgagagtctcctgtatctggatttctaaatatcttgccatacttgtctgttatttcattaaattggttttctaaccctttcattctcccttcgccatctgggaccctggtaattcagattttggtcattttatgatgtctcacatatcacaaatgtttcactcattcttttttattcttttttatttttggtctgtgttatttctaaagacctttcttctgcttgttctactcttttgttgaagctgtagttccagaacttttgtctggttctttttttttttaatgatatctatctctttggtatatttctcattcatgtcctgaattatcttttgttttttgttttcagaattctcttatatctccctgagcttctttagaattgataattttcattttctgggatttcatgaatttctttttgattgggatgtttctggggaattattgtgtttctttggaggtattaatatttccttgcttttccatgttttctgtgttattacattaatatctatacatctcatataacagtcgcttctttcagttttttgaatttctggcttttatagaggaggacttttcctgaaaatgcatctatgatgttggttttttaggacactttggctttgattctgggtgcaggctagtagtataatctttgcatgatttctttaattgtaaacaacaccagtggtgtctgtgatttccttagtggcttagggtgtagttattagtggaggttgtgctggagtttttatggggatttggataccaaatagttcagtatttggggcctagtggtggcagtggtaggtttggtgtgcctgttcctgggcctcagagttgcatacaccagcactgatgttggcacgtctaggtgggccaatacttgggcctccaggtgacttacccaggtgttgaagccttggttccagcaagtgggcaggttcttaggcctctgggcagctagtgtggcatgggcaatgacagtgacaatggcgggacaaccctctggttcctgagcagtttgctttcatattgggttgctgcaatgggatgaacaggccagtctccaagccctcaggcagcatgtgcttgtagatgttagttgtagtggtattagttggatggaaaggcccaccctcaggcccatgggagtagtgttcagatgccaacaatggtggactgggctgggtactcccctgacccccagactctgctctggcatggagaaggcaaagcttggccaggtaggcttgtccttaggtcctctgatagtgagtgcaggtaccagccatgttacgcaggagtgggtcaatgcgcatgctaccgtcaggatgctcagctggtgggaggaagcagttgtgctgctgccttgacactgggaagggcgggactgccttcagtggcaggcagcctaggcctctccagtggcaaggcagcagcacaactgccttgtcactgggtgtactacttgcacctcagtcccagtggtgcttgtgcctcagtctcctgtgcagtagcccatgtttgctcatgtctaagccacataggcagctgccatgcttctcttgagcttcagccctggcactgttgggttccaggacagtacataatctgttgtagacagcactcaaaaatggtaccttgctgtagctgtttaggtctcagggagtgtgtaggacccagcatgagctctttcccctccttagagcagtgctgttgcacaatctcatggtgttaccctctgttagtttcagagcctgtaaggactgaggggttctcccaaagctaggatttcaggagtccatggtgggaatgtgatctactgaggatctttcaattaccttttccccacattggggagtagctctcagctccctgctgatcccagccaagcagtctgcctcccttcctttctccttgctttaggtatttcctgtcactttctgttaaatcccagtgttctctcttggatgatctatttgaagtatggttattcactcactattttggttcttcttagtggaggaagcaagtaagacaatcaaaaccaagatttttatacatacatacatacatacatacatacatacatacatacatacatacgtacgtttgtgtagggaacatgcagggtattaaaatcagcttgtggaatttttttttaaccagaaaaaaattttaattgaatctaataaagggttagaaaatgaagttgagcatatctctagaaaacagtacagagagataggaaataggatagacaataaaattagagaactcatagcagtaaaaagaacagacttgctacacataaccccatgggtgaatctgaatacacagttattgagtgaaagaaaccattcacaagggagtatatagtagacgctttcatttatgtgaagtataagaatagataacactacgttcatggtcataatagtggctacctattaaagatggctataatacaggttagttataacacaggaagatgggttgattcatatacctatcagagatggtataatacaggaagataaattgtagttcaccaagtatatatacatggaaaaattatttgtgctatatacttaagttttgcttattgtgtattataaacacaattgaaataatagaggaggaaaaaatcagagaagcagtctaagatgcacaacacttcagcaataagaatttcagatttagataaaaataggaaaaatatagggcagaaaaaaagaaatacatcaaggatgttttctggtattgaggacaagtattcaaaatgaaagggcacactagttatccagcatattggataaaattcaataaaaatgactgtgtggcttagacaccagccaggggcagctggttgcatctttagttcaagctacttggggggccaaggtggaagaattgctttaagctaggaatttgaggctgtagtgtgctttaatcacacctctgattagccactgcactacagtccaggaaatatggtgagatactgtctcgggggtggggggggggaagatataccaaaacatattattgagtaattgtggaaccctaggaataaataaaagatcttacaaacttccaaatgagaaaaatataggttttgctgttcaatagaaatactggaagaaaggagacaatggaacatcatcttcaatatctgagaaaaaattatttccaacctagaattttatacctagcaaaattaccaattatgaacatctccattcagcttttctcaagaagctactgtagtatgtttgctgccaaaaataagaaaacaagtagaaaggaagacataagatatagaaattagaaaatctagtatgagtaagagaggtgaaaggaacccttgggaagagggaaaggaaaattccaactcgacagctgattagagggcctattgagaaagcagtttagatcagaagtcagaaggatcacaggagttttttgttttttgtttttttgtttttttttttgggacacagtcttgctctgtcacccaggctggagtgcagtggcacagtctcagctcaccgcagcctttgcctcccgggttcgagcaagtctcctgcctcagcctcctgagtatctgggactacaggtgcgcaccaccacacctggctaatttttgtatttttagtagagacagggtttcaccatgttggccaggctggtcttgaactcctgacctcatgatccacccgcctcggccttccaaagtgctgggattacaggcatgagccactgcgctcagccagatgtttttcaagaagatgaaattgataaatattgagagtatttaaacacattcagggaagattcataaaactgggggactgttttgagtacatagaaaacagcaaacaaaaaacaagataggtatgaactgtggaggaaactgagaaatggaatggaaagacaatactatattatccagtcatgaatggattatgtaactacatgactctattaatagaaatatctcatccagatagtgtattacatataacggaatactataaagcagcaaagaggagttaatcacagatatataaaaaaaaatggggagtaagaaaaacaagttgccactaataccacttataacaagttttgttgtatttctaaaaactgataaaaaactatagaatataacatgataaatatccatgtatccacaactaagcttgagaaataaacactatagccgggcacagtggcttacgcctgtaatcccagcactttgggaggccgaggtgggtgggtcacgaggtcgggagatcaaggccatcctggctaacacagtgaaaccctgtctctactaaaaatacaaaaaattagccaggcgtggtggggcactcttgtaatcccacctagtcgggagactgaggcaggagaatcgcttgaacccgggaggcagaggttgcagtgagccaagatcgcgccactgcactccagcctgggtgacagagtgagactccgtctcaaaaataaataagcaaacaaatataatggaatccttccatgcgctcccctctggtaccatcgctcttcgtctttgtctgaaggtaaccactgttttaaagttcatacttgtcatttctgcatacgtctttatactacatacagttgactcttgaacaacatgggcttgcactgtgcaggtctgcttacatgcagattttcttttacctctgccacccctgagacaacaagaacaatccctcctcttcctcctcctcctcagcctactcagtgtgaagacgatgacgatgaagactttcatgatgatccacttctatttaataaatagtaaatatattttctcttccttatgattttcttagagtttcttttctctagcttactttgtgtgacaatgtagtatataatacatataacatacgaaatacgtgtttttgtttttgtttttgttttttgagatggagtttcgctcttgttgcctaggctggagtgcaatggtatgatctcagctcattgcaacctccgcctcctgagttcaagcgattctcctgcctcagcctcccaagtagctgggattacaggtgcccgccaccacacccagcaaattttttgtatttttattagagatgaggtttcattatggtggccaggctggtctcaaactcctgacctcaggtgatccactcgcctcggcctcccaaagtgctgggattacaggcatgagctaccgcgcccagcccacaaaatatgtgttaatcaactgtttatgttatcaccaaggcttctggctagcagtaggctactagtagttgagtttttggggagtcaaaagttatacatggatttttgactgtgcatagggccagtgccccaactcctgcattgttcagaggtcaactctgtgtgtgtgtgtgtgtgtgtgtgtgtgtgtgtgtgtgtgtgtgtgtgtgtccctaaacaatatttagcaagttgactgtttttaaactttatatcaatggtgtatattaaatatgatcgtctacagtttgcttttacagctcaatagtttaaaaacaaaacaaaacaaaaagctgcagtaatccccctgccgttattcatgaggattacatttcacgacccccagtggatgtctaaaactagattagtactaaatcctgtatacattttcctatacatatgtacctatgatggtttaatttataatgtttgcacgggagattaaaaacaataactaataataaaatagaataactagagcaggccaggcaaggtgactcacgcctgtaatcccagctctttgggaggctgaggtgggcggatcactggaggttaggagttcgagactggcctggccaacatggtgaaaccccgtctctactaaatacaaaaattagccgggcatggtgtcatgtacctataatcgcatctactcgggaggctgaggcaggagaattgcttgaccctgggaagcagaggttgcagtgagccgagttcatgccactgcactccagcttggatgacagagcgaaactctgtctccaaaaaaaaaaaaaaaaaaaaaaaaaaaaataattagaatagtatgccagtatcactaatcttgtacattgtactttggagcaattattagggaaaataagggttacttgaacatagcactgtgatattgtaatagttgatctgatgacagttgaatggtaacccagaaggtgactaacaattagtgtatacagtgtggtttgattcattgaggttatgctcacatcatggtcaaaagatgaaagtggaatggtttatatctccttgttctcaggaaaaaataaaagtttttgaatgccactgttcaacttgacaccataaggttaagtattgttttgttttcttgatctgttgcagttaagacaatttgcatgcatcttttaggtatagctgtaaaattttctcttttgaaatgtcatgagtcaaaattgaactgtgggaaataaaaaataaagaatttgtctctatttatttttttaatgaaaatctctttgtatctcagaatttcatgatggtctaggaggcctgaaactctgtaggtctagactgtgaggatctctgagaactgcatgctctgcatattataggtactcaatcagcactgattgctggtggcttaaactgcaagaactacgttatagccagcaagcaaagatgcccaattagtcagtgagtgatttgccaggggaagtctattttcagcctgggtagttactattaagagaggatcctagaagctgcactttttgcctgctaggtgttcggaatacttttgaaagaactgaagtgttcagttcagtggagacatcttagatcctctatatttacaaatttacagcccttcatttcccaatttcttcaacctttttccttcctggaagtcatgctttcatagtttaggggaaataattagttttataaaacattcagttcctaaaagattaataattccaaaggaaaatatattaattgtagttatgaaaaatgcactgacaacaggctatcagctttcagaattgcttcttagtttttcattaaaatagaaaactcaaaatgtctcatgagttttatagaaaaattgagcatatttaaaaattaaatatgtataattttataagaacaaaaaaggtttgaccttgaaaatttttttcttcagttttattctgttacaggacagtgcctgcacattagtaggcacttggtgaagatttgtgaaatgaatgtgatagcataatgttattggaattcatcattgctgaattaatgtatatttgtggtttctgtaggaaatcttgtccttatctcacctcaggtttttaccataacatttttttcctctttgcaaatatcttttgattggtattttaattattgataaggtgtgcacttggaacattcattcaaaatgaataattccagtgtcaggggaaaaaaaaaaacctctggaaatttaatgtatggctttttttaagtgtatatatcacttttttttccaaaggacagtttgaaagtgaaatactccaaagtaaaagcaattttaactttctgaaactgtgtatgtttgtttgcgtgtgtgaaaaaagatggaaaaaaggaaagatagaagaagggagggttgggagattgagagagggagagagaggagagaaatgtgctttctatgaaattttgacacatttccaggataactgagaatgataaattaagtaaaaagaaaaataagcattcttattttatgtgggaagaattatgctttttttcctttaaagaaattgatttttatgaaaacaagcaataatagctttaacaaatacataaaaatttttagatcaagctgataactgcttttagataatagcctaagtcactgattagaagggaaaacccatctttggaaaatatcttttggaaatcatcttttgtgtatcatgttaaaataaaaatttttcttagtcatttcaaggaaattttctaacattaggaagggaaatattgttaattcttttcagcagaaggtagagtaccggcattaatgacaaatacatttttaccttagaccttttaaataattacttttttccttttaatagagaaaaggacacatttagatattggatgtttattttacattttaaaacaattttctttggggaaaaaatagggtgaaagttcttgtaaaaccaaggaaattttgaatttgtagagcataagtagatactgacaatttttcttgctacatctgaagttagttatttgacttaaaaggccaacaatctcatttattggtttctttgaagtagttggttgccttttttctctcccacaccaaactataaagataatttcataaacctctttttagttgagcttttgggttttgctaatttttctgacttagatgaagtttcaattaaaaatagactataaacttatatgtgggtggcagttgaatgagttgctatgacagttcatattatgaggttgaaccaaatgcaaagtagcttaacagaatttgagaaacatagagctatatcagtactaatgattacccttctttaacctatgctgcgtataaaggaacatgcctttctctcagggtacaaaagttttactggagaaatcagtgaagcctgtaacccttatcctactgctactaagaacctattttcctaaggaacaccccactttcccacttgtggatattggtaaaaggtcttgggaatatcaagtctggtctgtattttcccatcctctacaggtaatctcagaagaggtgcttaataaatgctatacaccatcatccaattcttgctcctcctgttcctgaaagaaagtttagccaggcagggtggcgggcacctgtactactatggagagaggtgtagagtggtgctacctgagagcataacactaatgatctgccatcgtgtgaattttccatatttttctgcattgtttgtggtcattgtggaaaagtatgattctgatgcatgtatcaagatcttttaaagaacacaaaaaagttataatttttttcaactctaaaatcttccagtgaaactaacttttaaggaagatcttccatgagtatcaagtggcttcacataccctatgcaagagtattgttcaataagggctcacccagttagttactctcttccttagtccaccttttaaaaatgctgccagatgaatctccttgaagcttacattgttatgtaatttccttattttctttagaaacaaattcagaactccttagcttacctggtaatgctctctacaatctgccctgaacctccctttccaatcttagacctcatttctctcgtcatacgtgctgtggtacaacaatctctgaaccctgctttgggaaaaccatttctttgcttatgttggtacttccatttctctttgctgtgaacatttgaactatttccaaagtccagatcaaatgcctagtccctcttaggctttctcctgcttttcaacctaggagtagtaatttttctcttttttggtttctttgtaaatctcttctaaattttattagtatttaacccttcccttatagttctttacacatctttttgttctctgccagaatataaactacgtaagaataatcttttacatgtttccaaacccaacattgtctactctgtatcctgtatagtttgtgccctgtaaatgtctactgaattgaacttaaactttgaagtataaccctatagacataccactaatctagggacgtttgtatactctttcaatgctaccatgtactctttgaactgcatcttgacatttaatttttctatgacttagttttttttaacccacaaggtggttataatgatatttcactgtgcactataaaattgttatgttatctttcaaagaactactttgaattccctgggagacaaatggtcaaatatatgaaacccattatagaatttcacctctgacatatggcacaacttagagataattttgtttaaatgccaagtaacctggagctataagtcccgtaataccacataggtatacatgtttatgtatatgtaatcgttcatgtttataacctcattttgtagtgtgatagtaggctatggtaaatttgtcttaaaattttttaggaggccaaaattcttacagaaaaacatattagtgtagtgttgagagtctaggcactagagatagactgcctacgttcattaaaaagttaaataagttgcccggggtcacacaaaagactaaagggtgatttgaacttaagtttcctcatttatcattcagaataataagagctcctatttacagtatagttttcaagaataaattacctaatactggcccatagtaaatacatatttattatttttattatattttcatagataaatcatacataggcttagttggaggttaaacttagtggtaaagaacttagcatcaggtaaaccggggttttatttttgatttatttttttcatttcttttttttcttttttttattattttctttattatacgttaagttctagggtacatgtgcacaacatgcaggtttgttacatatgtatacatgtgccacgtgggtgtgctgtacccattaacttgtcatttacattaggtatatctcctaatgctatcccttccctgtccccacaccccacaacaggccctggtgtgtgatgttccccaccctgtgcccaagtgttctcattgttcaattcccacctatgagtgagaacatgcggtgtttggtttaaaatccttgtgatagtttgctcagaatgatggtttccagcttcatccatgtacccacaaaggacatgaactcatccctttttatggctgcatactattccatggtgtatatgtgccacattttcttaatccagtctatcattgatggacatttgggttggttccaagtctgtgctattgtgaatagtgccacaataaacatacgtatgcatgtgtctttataacagcatgatttataatccttcgggtttatacccagtaatgggatgtctgggtcaaatggtatttctagttctagatcattgaggaatcgccacactgtcttccacaagggttgaactagtttatagtcccaccaacagtataaaagttttcctatttctccacatcctctccagcacctattgtttcctgactttttaatgatcgccattctaactggtatgaaatggtatctcattgtggttttgatttgcatttctctgattgccagtgatgataagcattttttcatgtgtcttttggctgcataaatgtcttcttttgagaagtgtctgttcatatcctttgcccactttttgatggggtagtttgattttttcttgtaaatttgtttaagttctttgtagattctggatattagccctttgtcagatgggtagattgtaaaaattttctcccattctgtaggttgcctgttcactctgagggtagttccttttgttgtgcagaagctctttagtttaattaaatcccatttatctattttggcttttgttgccattgtttttggtgttttagtcatgaagtccttgcccatgccaatgtcctaaatggtattgcttaggttttcccctagggtttttatggttttaggtctaacatttaagtctttaatccatgttgaattaatttttgtataaggtatacggaagggatccagtttcagctttctacgtatggctagccagttttcccagcaccatttattaaatagggaatcctttccccatttcttgtttttgtcaggtttgtcagagatcagatggttgtagatgtgtggtgttatttctgagggctctgttctgttccattggtctatatctctgttttggtaccagtaccatgctgttttggttactgtagtcttgtagtatagtttgaagtcaggtagcgtgatgcctccagctttgttctttttgtttaggattgtcttggcaatgtgggttcttttttggttgcatatgaactttaaagtagttttttccaattctgtgaagaaagtcactggtagcttgatggggatggcattgaatctataaattaccttgggcaatatggacattttcaaaatattgattattcctatccacgagcatgggatgttcttccatttgtttgtgtcctcttttattttattgagcagtggtttgtagttctccttgaagaggtccttcacatcccttgtaagttggattcctaggtattttattgtctttgtagcaattgtgtatgggagttcactcatgatttggctgtttgtctgttattgatgtagaggaatgcttgtgatttttgcacattgattttgtattctaggactttgctgaagttgcttatcagcttagggagattttgggctgagatgatggggttttctaaatatacaatcatgtcatctgtaaacagggacaatttgacttccccttttcctaattgaatatcctttatttctttctcctgcctgactgccctggccagaacttccaacactatgttgaataggagtggtgagagagggcatccctgtcttgtgccagttttcaaagggagtgcttctggttttggcccattcagtatgatattggctgtgggtttgtcataaatagctcttattattttgagatatgtcccatcaatacctagtttattaagagtttttaggccgggtgcggtggctcaccacctgtaatcccagcacttttggaggccaaggcaggcatatcacgaggtcaggagatcgagaccatcctggctaacacagtgaaactctgtatctactaaaaatacaaaaaattagccaggcagggtggcgggcacctgtagtccctgctactctggaggctgaggcaggagaatggcatgaacccgggaggcggagcttgtagtgagccgagatcatgccactgcactccagcctgggtgacagcacgagactccgtctcaaaaaaaaaaaaagtttttagcgtgaagggctgttgaattttgtcaaaggccttttctgcatcttttgagataatcatctgttttttgtctttggttctgtttatatgatggattatgtttattgatttgcgtatgttgaactagccttgcatcccagggataaagccaacttgatcgtggtggataagctttttgatgtgctgctggatttggtttgccagtattttattgaggatctttgcatcaatgttcatcagggatattggtctaaaattctctttttttgttgtgtctctgccaggcattggtatcaggatgatgctggcctcataaaatgagttagggaggattccctctttttctgttgattggaatagtttcagaaggaatggtaccagttcctccttgtacctctggtagaattcagctgtgaatccatctggtcctggactttttttggttggtaagctattgattattgcctcaatttcagagccttttattggactattcagggattcaacttcttcctggtttagtcttcggagggtgtatgtgtcgaggaatttatccatttcttctagattttctagtttatttgcgtaaaagtgtttatagtattctctgatggtagtttgtatttctgtgggatctgtggtgatatcccctttatcattttttattgcatctatttgattcttctctctttttttctttattagtcttgctagtggtctaccaattttgttgatcttttcaaaaaaccagctcctggattcattgattttttgaagggttttttgtgtctctatctccttcatttctgctctgatcttagttatttcttgccttctgctggcttttgaatgtgtttgctcttgcttctctagttcttttaattgtgatgttagggtgtcaattttagatctttcctgtttactcttgtgggcatttagtgctataaatttccctctacacattgctttaaatgtgtcccagagattctggtatgttgtgtctttgttctcattggtttcaaagtacatctttatttctgccttcatttcgttatgtacctggtagtcattcaggacaaggttgttcagtttccatgtagttgagcagctttgagtgagtttcttaatcctgagttctagtttgattgcactgtggtctgggagacagtttgttataatttctgttctttaacatttgcagaggagtgctttgcttccaactatgtggtcaattatggaataagggtgatgtggtgctgagaagaatgtatattctgttgatttggggtggagagttctgtaggtgtctattagatctggttggtgcagagctgagttcaattcctggatatccttgttaactttctgtctcattgatctgtctaatgttgacagtggggtgttaaagtctcccattattattgtgtgggagtctaagtctctttgtaggtcactcaggacttgctttatgaatctggatgcttctgtattgggtgcatatatatttaggatagttagttcttcttgttgaattgatcccttcaccattatgtaatggccttctttgtctcttttgatctttgttggtttaaagtctgttttatcagagactaggattgcaacccctgcttttttttgttttccatttgcttggcagatcttccttcatctctttattttgagcctatgtgtttccctgcctgtgagatgggtttcctgaatacagcacactgatggttcttgactctttatccaatttaacagtctgtgtcttttaattgaaacatttagcccatttacatttatagttaatatggttatgtgtgaatttgagcctgtcattatgatgttagctggttattttgctcgttagttgatgcagtttcttcctagcctcgatggtctttaccatttggcatgtttttgcagtggctggtaccagttgttcctttccatgtttagtgcttccttcaggagctcttgtaaggcaggcctggtggtgacaaaatctctcagcatttgcttgtctgtaaaggattttatttctccttcacttatgaagcttagtttggctgaatatgaaattctgggttgaaaattcttttctttaagaatgttgaatattgtcccccactgtcttctggcttgtaaactttctgccgagagatccgctgttagtctgataggcttccctttgtgggtaactcgacctttctctctggctgcccttaacattttttcctttatttcaactttggtgaatctgacagttatgtgtcttggagttgctcttctcgaggagtatctttgtggcgttctctgtatttcctgaatttgaatgttggcctgccttgctaggttgggtaagttctcctgggtaatatcctgcagagtgttttccaacttggttccattctccttgtcactttcaggtacaccagtcaggtgtagatttgtttttttcacatagtcccatatttcttggaggctttgttcatttctttttactctttttttctctaaacttctcttcttgcttcatttcattcatttgatcttcaatcactgataccctttcttccacttgatttaatcagctgctgaagcttgtgcgtgcatcatgtagttctcttgccatggttttcagctccatcaggtcatttaaggtcttgtctatgctctttattctagttagccattcgtctaatctttcttcatggtttttagcttctttgcaatgggttcaaacatcgtcctttagctcggataagttcgttattactgatcatctgaagtcttcttctctcaacttgtcaaagtcattctctatccagctttgttctattgctggcgaggagctgcgatactttggaggagaagaggccctctgatttttagaatttttagcttttctgctctggtttctccccgtctttgtggttttatctacctttggtctttgatgatggtgacttacagatggggttttggtgtggatgtcctttctgtttgttagttttccttctaacagtcacgaccctctgttgcaggtctgttggagtttgctggaggtccactccagaccctgtttgcctgggtatcaccagtggaagctgcagaacagcaaatattgcagaatggcaaatgttgctgcctgatccttcctctggaagcttcatctcagaagggcacctggctgtatgaggtgtcggttggcccctcctgggaggtgtctcccaattagactactcaggtgtcagggacccacttgaggaggcagtctgtccattctcaggtcccaaactacatgctgggagaaccactactctcttcaaagctgtcagacagggacatttaagtctgcagaagtttctgctgccgtttgttcaactatgccctgcccccagtactggagtccaggaaggcaggcaggcctccttgagctttggtgggctccacccagttcagtcttcccggctgctttgtttacctactcaagcttcagcaatggcggatgcccctccctcagccttgctgacacttgcggcttgatctcagactgctgtgttagcagtgagtgaggctccgtgggtgtgggactctccgagccaggtgcgggatataatctcctggtgttccgtttgctaagaccattggaaaagcgcagtattagggtgggagggtcccgattttccaggtactatctgtcatggcttcccttggctaggaaagggaattccccaaccccttgcacttcccaggtgagcaatgccccacgctgctccttgggctgcacccactgtgtgacaagccccagtgagatgaacccggtacctctgttggaaatgcagaaatcacctgtcttctgcgtcgctcacgctgggagctgtagactggagctgttcctttttggccatcttggaacctcggttcaaacctgagttgtaatactcactcttcctgttgctgcctatgtaattttgtagaagttacctaattgcttccaagcttctgttggattttttgagaactgaatgacatagtacattttgaatgcttaatgtattgctttgtgcatggtattatttaataaatattagctttggttatacttgcaatgttctgttatttctctttttcacacatgttgcttgcaatctatatggcatctattttagcattaaagtagaaagttttaagtagaaaggttctgtcataaagaaaaaaagaatcttaagaagataaatctaagtggaaatttaaagaaaataaggcttttttagatctagcctgtaaactcctttagactcttgaatttgatattctggtagctcttccgagtattaggaaaaaaagtcctttaagctgctctaaagttgggtctggaagcaatactagaaaaagtagaaactggaaaaatttcacatctttagatcaatgatgtccaaagtgaagagtatactataaccaagtgggtgagagaacatattagaccacctacttacatatattttatctaaaaaattttaaagtacaggttgatagtagtgtatgtaggtagcctattaggtataaatatattgagatagtgactcagttttatttttaaaaaatagactattaaaccactgctctagagaatggctgtattaagccaaagttttagtataaacaaagtttagatatttgttgttcatatattttagataacacccagttctgtacatttatcagctctttgctttcctgtaatgtgccatttgtgataagggggaataggaacttttctctgaatccttttccatagaaggtgcttttaaagatgcctctttcagtccttgctaggtaagggaattagaaccattagaattgctttacaaaaattgaggaaaagattatttgtttagctatttgtttttagtaaattgcatcctttgcattaagataaagcagttggccgggcgcggtggctcacgcctgtaatcccagcactttgggaggccaaggcaggcggatcacgaggtcaggagatcgagaccatcctggctaacacggtgaaaccccgtctctactgaaaatacaaaaaattagccgggcgtggtggcgggcacctgtaatcccagctacttgggaggctgaggcaggagaatggcgtgaacccgggaggcggagcttgcagtgagcagagatcgcgccactgcactccagcctgggcgaaagagcgagactctgtctcaaaaaaaaaaaaaaaaaaaaaaaaaaagataaagcagttaaattaacacaaggccaatagggattttattaaatttcctttttaaaactgagttttgacatagagatttaaaattaaacagacctgtattcaaatcttcattcttgatcttgctagctgtgatgtttctttgtgtgtaaaaagttaggggtataattatagtagccttttcctgctaccacctggcatttagcagaccagttctcagtgaatgtgagcgttgattatttttaaggtggtagagagctgatgaaaagagcaagtaagcctgggtgcagtgactcacacctgtaatcctggtactttggaaggccgaggcaggaggatcacttgagcctacgagtttgagaccagcctaggcaatgtagcgagacctcatctctgcaaaaaaataaaaaattagctggatgtgatagtgtgtgcctgtatgcccaggtacttaggtggctgaggtgggaaaatcacctgagcacaggaagttgaggaagcagtgagctgtgattgtgctactgtacttcatcctaggcaacagagtgaaacactgtctaaaagaaaagaagaaaagaaatatatcttataccatagggcttaactttctttaaatgtgtgtaaattgaaagtaattctgtgttcttttagacatggggaatttatctgcaaagtttggatatggagtcattgtatttgtatttaaattgacgttagatgcatcagtttattacctattacatagtatttgaaaataatcatatttattttgtcttttagcaacagatgaaatttagtcttacaccgagacagactattcacctagttaaatatgaagggtctatgaaggtctccatgacaccctgtaaccagctgcaatttgacattagacttgatgttctgattacttatactttttgttttagttcctttcctgagcctgaattgtacaaatatgtcctaaaacaccaacttattaagaggcttaatgcctgttaaatgcgtcagtgctcttggcagcttagcatgagtgctttctttgcatgggaggttgcagtttagaagcaactttatggatcatttcccaggttgatgttacatatgttcattttacaacctgtgtgcataatctctcagggtgaaggtaattaagagaaagcataatctacagaattgaagccaagtaatctaagattctgtttttaaactctttgctatataacattagttaagttgtttaccctcttaatttatccatttgtaaaatgatagtttttgtttttaaagtgctctattacccttactttaaaagtcctgtctaccatatatttaaaactataagtggaaataatgaagaaactctgaacttgcttttgcttatatatggatatatcatattatatgcctaagattggagataaattttataacctgattttctcatggcagtgtacaaatgaaattattctgtaagtttttcaaaacagtaaaatcactatttttcatctttttgtgagatgtacttttttcatacccacagaaatttgcagagggcttctgcataccacccatcttccaatatttcagtatttggctaggttcccctcattttgcttaattattcattttggttggaaagtttaactgccactgaaacttcagattctatatccttaccactttcctgatttttaagtttaacattcagtaattatttgatgtttattttagctgcataggtttaagtaacactaaaagtatacctgaatctctaggtagcatatttacaagcttagttagaagtaccaaaaagggcttagaaaataatttaaaactacaatagtgatctaaagtttttaatgatttttcaattatgaaaatgttttactattgtgcttatcccatgaagatttaaaaatttagtggccgatacttgaaattgtataggtagataggatacagcatatgttattttcagtgtatctaaaaccatgaacttgggtcctgtgtgagtgcaaagtggatactgaaaactagtttaatttcctcagattcatctgataggttatatcctactcaaaaatgacaggaaagccaaaggctactatgttagccatttctgctgactcttattggtatcctgtaccctatacttcttaaacagattacattttttcagtatactagtagatctcaaaaggagatagaagaagcagggttatttctccagggtagagtattgttttgactatttcaattttttcttaatgtaaattatagaaagtaaactcaacaaaattttctttcagaggatgggaaagtggtggctgtaggtacttgaaagataacataagaaagcattaaagggggagactggattttaaacattggaatgcaatcctatttagatattgtaacatagcattcttgtaaagagaaaagccactgcaagtctctacaaagttggccaccattccaggctaaattttagaagtatgtagagatgaagtaaaaatctgagacttttagtaatagctcttgagatctcaagaaatggaacaagctgaagaagtaaaactattgaaaagccaagccaacttgttgctgaattccctaaaccaagaataatttcagaagcttaatttttttcctacaaatagtatagaagaattaacattaccattaaataggggttgagcactataccagtctgaaacccttgagattaaaactagctagaagacaagctgcagaagacaagacagtttataatcccttccttcagcctcacccaaggttttggaaataatcttatgacagctgagagtaagccaggtgcagtggcattccctgtagatccagctacttggggggctgaggtgggagcattgcttgagcccatgagttgaaggctgcagtgcactgtgatcatactgtaaatagctactacacttcagcttgggcatcatagtgaaaccccatctctaacaataataataacattttaaaataaattattaaaatttcacatttagaattatttttctactacagtaattggtacctcagtcacttaaaatggtaacactagttgagaattatacctccacaaatatatatctagataatccattatgttgtctctagcagatttttctgaggaaaaccaaaaggaggattggtaattaaaagtagttaatttttacattcaagaaaggaaaggactattctttgaacaaagtcccaagtcatgaataagtaatcaccagtaattagaaatcacttttgatcagtacacatgatgtgaaaatcagccaatcagtgacagcctcactccagtggccatgcttctgaaaatcatcgagtcaacaacagccttactccagtaactatcttctgcaaattagcaaatcaacgatagtcctaggcttctgaaagtcagccagcgactactcttgtatgttctgcatactgactcattatttgtcattaaaaattcaatggacaaaagaacaaagtatgtctgatgtggctgctttagaggccaggatctaaatggacccaagattcctagttagcatctgatagaacttttagatagaaagtcagcaaggatataaaagatctgagtaacacaaccaacctacagaatctaactggcatttataaaacccgctaccaagctgggcgcggtggctcacacctgtaatcccagcactttgggaggccaaggcaggtggatcacaaggtctggagattgaaatcatcctggctaacacggtgaaaccccgtctctgctaaatatatatatatatatatatatatatatatatatatatacacacacacatatacacacacacacatatatatatacacatatatatacacacatatatatacacatatatatacatgtatatatacatatatatatatacacatatatatatatatatatatatacatacacacacacacatatatatatacacacaaaaaattagcctggcatggtggcacacgcatgtagtcgcagctactcgggaggctgagggaggagaattgcttgaacctgggaggctgaggttgcagtgagctgagatcgcaccactgcactccagcctgggcgacagagcaagactccatctcaaaaaaacaaaagaaacaaaacaaaaaccactctacccaacaagagtagaatatgagtggaacatcaccaaggtagatcccatcctgggccattaaacaagcctcaacatatttaaaagaattgaaatcatatagagtatgttgtctgaccacagtagattcaaagtagaaatcagtaacagacaacaggggaaaaatgatccatgggtcaaagaggaagtctcaaaggaaatttaaaaatacatacaactgaatgaaaataatatatatcaaaatatgtgggaggtagttaaacctcccacatgtgtgctgacagggaagtgtacagcagtaagtgctcacttttgaaatgaggaaggttctcagatcaatagtgtaagtttctttctcaaggaactactaagtttctatgtaagagactagaaaaagaagagaaaataaacccgaagtaagcataaataaataaataatgaagacaaaaacagaaatcgaagaaattgaaaatacaaaaacaacagagaaaaaccatgaaacaaaagctatttttggaaaaaaaaattaataaaattggtaaacctttgacaagactgaaaaatctaagaagggaaggcctgaatcaccaatatcagaaatggaatagtggatatcagtacagatcctgcagccattaaaaagttaacaagaaaacactataaacaacttgatacccataatttagaagaaatgaatctcaattctttgaaaaccacagactaccaaaattcaaccaaggtgaaatagacaatctgaatagctatttaaccattgaagaaattaaaagctcctgaaaaagaaatcaccgtgtcaagatatttcttcttttttaaaaaagatattaatacatgtttaacaacattcattttatcctttccattttggcatggcacatgatcttcatctggatttatattttatgtgataaatgattttttaatttaagttcaagggtacaagtgcaagtttgttacgtaggtaaacttgtgtggtgggggtttttgtatagattatttcatcacccaggtattaagcctagtattcattagttgtctttcttgattatctccctccttccaccctccgcctccaccctccaaaaggccccagtatgttgtttccctctatgtgtccttgtgctctcatcatttagctcccacttataagtgagaacatgtggtatttggttttctgttcttgtgttagtttagtaaggataatggcctcctgctccatccatgtccctgcaaaggacataatctcattcttttttatgactgtatagtattccatggtgtatatgtacaccatggaaagaatgagataaaaaagaatgagatcctatacaccatgaaataccaatactctttatccagtctatcactgatgggcatttaggttcattccatgtgtttgcttttgtgaatagtgctgcagtgaacatatgcgtgcatgcgtctttataacagaatgatttatattcctccgggtatatactcagtaatgggtttgctgagtcaaatggtatttctgtctttaggtctttgaggattcaccacactatcttctacaatggtggaactaatttacactcccatcaacagtgtataagcgttcgtttgtctccataacctcaccagcatctgttattttttgactttttaataacagccattctgactggtgtgagatggtatctcattgtggtttcaatttgcatatctctaatgtaatgatcagtgatgtttagcttttttccatattatttttggccacatatatgtcttcttctgggaagtaactgttcatgttctttgcccactttttaatgaggttgtttttttcttataaatttgtttaagttctttatagatgctggatattagacgtttgtcagatgcatagtttgcacaaattttctcccattctataggttgtctatttaatctgctgatagtttgttttgccgggcagaagctctttagtttaattagatcccatttgttgatttttgcttttcttgcaattgtttttggcatctttgtcatgaaatatttacctgtgcctacaccgcaaatggtattgcctaggttatcttccagggtttttgcagttttacgttttgcatttaagtctttaatccatcttgagttgatttttgtatgtggtataaggaaggcatccagtatcaatcttgtgcatatggctagccagttatcccagccaagatatttcactagtgaattttaccacacattttaggagaaattaacttcaagttcacaaaatctcttccagaaaagagaagaggagggaacacttcctgactgattttatgaagctaatgttattactctaaaacagacagattgtacagaaaaataaaactatagaccattatttctcacaaatgtacatgtaaacattttcagtaagaatcataatgcagaaatcctcaacaagaatcatagaattagggtcaggcgcagtggctgatgcctgtaattccaacacttaggaaggcagaggcaggcagatttcttgagcccaggagtttgaaaccagcctgggcaatatggcgaaatcccatctctgcaaaaattagctggacgtggtggcacacacctgtagtcccagctccttggcagggctgaggtgatagaatttgggccggggaggtcgaatctgcagtgagctgagatcatgccacttgcactgcagccagggtgacagagtgagaccttgtctcaaaaaaataaagaagcatagaattagaaggaattacaatcaatattcctcctcttcaagattaataaagattgcaactttaatggcaacctcaattctgtgctgttttagttactcctcctatagtctgaaaatgaattgatttaaggcaaattcagtaggtttttacagtttcatttgtcatcagtgtttttcaaatataagtacttttgcaaattggaccaaattcttggtgcaatttaaaaacttgggccttctatcatttgcctattttgagaaaggctatttcccttttctttgattttctattttttagagtgttgaacctacttaatctgaagtttacctcccttttaaaggaagtgtctagaagtgtttctggcaatgtgttcataattaggttaaattttcctcttgataacctggtggctgtagaactgaaatcactgtgagttaaaataatcttagtgtgtctgtgtccccttggcatttgtaaatgagttccttgaaattttgtattggtatgttttaaaacatcagtacttttatttcaaagtaaaatatgccataatatgttttataggatgaagtgtttgttttttatttatacactataattacgtgttgtatcaccttctttgaaaagacatattttaaaataatatctcaattttaggcaaagcacattcctagaagtttaaaattaacattttctgtctaaattaaggagttaattttctgtgaaaataaaatgtttgtggggggtgagtcttatcacatatcacagatcatacttgttttaaaggaagaaaatgaaagtcatttttaaatttagttggtgacataagcagaaagcatgtttactttttgatacttaataacacttgaggtaataataaacaatgataatttcctaatcttttttgcattgttgtaattaagcttacacttggagtttccaaggccaacatgtaaggaattgctctttaattaggtttccaacagttagaataagcaaaaggatggctcatctgacattgcagtgtgtcctgatagagttcccttagttatggttaatgcagataaagaaaacagcaagcatactttcacaattttatattttctgtataaatgagaattcttatttttagagaagtatattgaaaagtaataacacaaattaaataaatggaatagactataaatttagggccatttaaaaaggattacatgtatgccaaggtacaaattatctttcatactcaatttcagctgttactcatcactgcttaacctactcttgagtaataacaacattctttaagctttaaaacattctctaatgtgtttttaatatagacagaatacccatcattagctttatggcaaaagcccttgcaatcatttatttcccttaatcacgtaagcatcaaaaatttattgatcacctggtctaattatatgtagtgttgtaagtatgtctcaggattcattcaacaaacatttgtcgagcatttattatgtaacaagaaaaatgtatgtcccccccccaaaaaaaatgtatgttccctttctttaatgtttactgtgaatagtgaagatatagatatacatagaaagactaataattcatggaaggaaattatcagtgttgactctcaatttggggaagagttttgaagagaaaaaagatcacttttggtttgcagtggatattgatagtctcaaaggtgatggaatctctgtgtaaagatgattttgataaaggaaggatttagggactacattatggtagagaaccgagagtgaaattataggaatgggaaagaatatgtctcctattctttttcaggagaagtgactatgtcagtttgtttggagtgcaaagttcatcacagtagatgaatgaatggttagaaaagaaaggtattagggactggatattgtaggactatgtttggatcatatagtgggaatgaaatataaaagctgagttcgtttgccttttttttttttttttttttttaagatggaatcttgctctgtcaccaaggctagagtgcagtggcgcgatcttggctcactgcaaccttcacctcctaggttcaagcgattctcctgcctcagcctcctgagtagctgggattaaaggtgcccgccactgtgcccggctaatttttgtatttttagtagaaatggggtttcaccatcttggccaggttgttctcgaactcctgacctcatgatctgcccactttggctccacaaagtgctgggattacaggcgtgagccaccactcctggcctcttttgactttgaaaaattatttcattacatatgttcattttagaaagattagaatatactgatgaagaaaaagtagaaaataataacacaaaatcaaagtttttagaaatgcttatttggtgttatccaggatggatgaaataaaaggatgactgaaggtgggaggccagttaggaggctgttttggtagtcttctttccctcttccccatcctgtactcttctcttttatcaaatggttgtactggtggcaaaagcttgaaatttgaggagtcagagccaaaagaaggatgcagcctgaatagtaactctgggatcaggttacacagttgaaataatagacattacacattacttttctttcctgggtcttgaggaagttctttagtgagggctcaagaaatttggaaatatttgtagatggatgaagtaagttcaactttggtgatggctttatgcagtttgataagtgcacatttctccgagtacaaacttatgggaacattattggtggtgagaaggaggaatctggagatttgtactaatgagttagtggcatttttgtagagggagattcacatctctgaattcttcaaccatcccaaaattgagcatgtcacggaatctttctggctaacagtaagctgtaggttgttacatcctttaatgccatatgtctgcaaaggatcttatctcatctatatatactcttgaatgacatgaactggcacatttatgactagtgcaaagggactaactcgcattcgcatgcaaatttctgtggctggaaaggtcagcccgactggcttgtgcagcaacctttgccattgcccttgtttgataatgctgtgaatttcccatgattttcctaagtgtagcttggaggttccactcaagatcaagcctgagattccccatgaactcttcaggactatggcaggtctaatatcttcaatttggacattatcaactgccttgctgatgccttgattgaggctgagtgataccagtgtgtatctgctggatacaaatatcacttctgtcattccgatggccatgtgtatctcttgcttaggtagcatttctggcctgaaccagtgataggctatataccaccagagtatcctccagaaattcttctccttacttctgtgaccctaccccatccccgtcattctacttctactactttggggaactgtggctccaccataaccttgatgtaagagcaggtgctagcaccccattgaatatttccacttagatcatatcagagactgtacctgaattatatcatcctgttgttctcatggccagatatgggggcagccagcccaagctaggatcccagtggtttctttagctttataccaagcttgaatgaactagagatgttgcccaagaattctaagcctctggagactaaactgcctgtctaaatccttataggaatacagactcattcttaggagttagagttttacatccttcaggatatacattggaaaagaacaattgctctgccaggagggctgctgctttttgattgagaaagatgatgcggccatggaaagcacatggaccacatcaacttggggtcagggttatcagagggcaggcagttccagtgctaccacctgagcactcttcttcagaagaaaaagaaagcactccagcttaatccttgtattttaactattcccaatttaaagagttacactgcagccttttgcagccgcttccttatcccctgaaggggaatgggataaggaaaacattctcctttccctgaagagtttcccttgaaaattgaagagagaaaaattttaagtcatcagataaaggcaagggcagttcatccgtattactctttgaggcacggatatatctcaattaaaatctgtgttaattttcccacagttcagttgtattgacctttttcattcaaaaggtccagcctggggctgcatgccagccaacttggtgctttctgtaaaagccatgatgttttctctcagcctaaggaaattctttgtgctgttttatagctttactgccagagtaagttataattgccattgaatcaatatatatagcttaataagtttgctgctttacccagtttaatcttgtctcattttcaaagtttgccaagagttaccctagagagacaaatattctttctgtgtcttctatcattctgttgaccttcatagttgatttggctgatctttctaaacaaaggaagaccaattaatggttaaaggtagaagtatctggacctctactccaaataaaagctttcaagttacatttggagatgatactcttgaatattttttaaccatactgtgtctcttaaacaaatgctgctgcttacccataacatgctaattaataccttatatatctcattcctgataatgaaaagttactagtaccatggtgttgggaggttcattcccgtgggcattatatgaggctagaagaaaacaaagacatgacaaatctatagacttatggttcaggcagatactttctttagtttttttctcagtcattatgaatcttgcattctagacaaatgtagatgtatttctctcagagtaaagaatggaagaaacctgaaggtagctctctgttgacagagaaagaaggaattacctatctggaaataatctgttcagtatagttttattgtcagagtaagttaaaatgaatgattctgccaaaatgtcaagaatgggtcacctaggcatcctttccagaaaaggggcatctagtcagtcatcctttccaagctatgcttttgttacttaagtattcactgaaatgtaaataccatgtgttttatcattttttatactctgaaagtatcattttactaatatgtttttgaaataggtactatattttctattgctcatattatcataagtcttagaactttatctattcaaggtaataaaaatttcaactttggtctgcccagactgtagaaaaccaagcattgacacacacataaaaatatgtatatacacatacagaacatttactttatcaaaaagaagagtgcatagggacttcagatcactgtattgtgaagggacttatccgcatctttgataatttaggatagagtatcttaaaataacctttttatgttctagacaccaaactgtgctggactggtaacatattaagaatatgcttaaaacattctctcaatggaaatattacctttttaaaatattttaaatttcaagacggtagaagtccattttcttgtactgttgagtgagattgaaaataagactagagaattgagtggaagaaataatttcatttgagccattccatttcacgtctttcctaaatggtcagttcttttggttctggttctattgaagtcctcatgatgagaaacagggttagtaaagccaaaagcatgacctgggaacaataatgggttattgattctgccagaagtccacctaccagtggccctggcactgtgagaatagagcaggcacatgtatccaaaaaagttcccttttggccgagtgtggtggctcacgcctgtaatctcagcactttgggaggcctaggagggcagatcatgaggtcaggagttcgagaccagcctggccaacatggtgaaaccctgtgtctactaaaaatagaaaaaattagccaggcgtgttggcacatgcctgtaatcccagctacttggggggctgaggcaggcaattgcttcagcccgggaggcagaggttgcagtgagctgagaccacgccactgcactctagcctgggcaacagggcgagactctgtctcagaaaaaaaaaaaaaaagtttccttttatgaaagctgtatttcagtattgacaattgcagttcccttttgggtttctgtgtcaagaagacttttttttctaccacgtttcctcatcctgcagactgcactaaactgtgtctccaccttcaccccctcagaatatacccaagtgtagtattcatggtagtcccatatatcagttcttttttcagtcacatcaaagttatgcaactggtgggtgccccatcctatgagttaagaatttaagaactgtgaatagaaaagaatattgcgactggtgggtgacacagtaaataagtaagctgagaataggggcaggggaatctactttgtaagtcgtgttaattgtgatgattctgggaggcagaattgctgctgatggagaaccactactttatttatttacttttttcagcttttattttagcttcaagggatacatgtgcagattgttacatgagtaaattgtgcaatgctgaggtgtaatgtacaaatggtctcatcacccaggtagtgaacatagtacccaataagtagttttttggccatcctccccttcgcaccctcccccttctagtagtccttagtgtctgttgttcccatctttatgcccatgtgtactcagtgtttagctcctgattataagtgagaacatgtggtatttggttttctgttcccgtgttaatttgcttaggataatggcctctagctgcatccatgttgcttcaaaaggacatgatttcagagaaccactgctttaaatcacataaattatttacggaaacatacttcttgtaatgcaattagtcttattttgccacagtggagttacttatgtgtgtaaataaaatttagagccagggtgaacaaacaaggccctgaggtcaaatctggcctgccttgtgttttgtaataaagtttgtctctgtttgcagatgacatgatcgtatatttagaaaaacccattgtctcagcccaaaatctccttaagctgataagcaacttcagcaaagtctcaggatacaaaatcaatgtgcaaaaatcacaagcattcctatgcaccaaaaacagagagccaaatcatgagtgaactcccattcacaattgctataaagagaataaaatacctaggaataaaacttacagggatgtgaaggacctcttcaaggagaactagaaaccactgctcaaggaaataagagaggacacaaacaaatggaaagacattccatgctcatggataggaagaatcagtatcgtgaaaatggccatactgcctaaagtaatttatagattcaatgttatccccatcaagctaccattgcctttcttcacagaattggaaaaaattactttaaacttcatatggaaccaaaaaagagcccacatagccaagacaatcctaagcaaagagaacaaagctggaggcatcatgctaccttacttcaaactatactacaaggctacagtaacgaaaacagcatggtactggtaccaaaacagatacatagaccaatggaacagaacagaggcctcagaaataacaccacacatctacaaacatctgatctttgacaaacctgacaaaagcaatgggggaaagattccgtatttaataaatggtgttgggaaaactggctagccataagcagaaaactgaaactgaaccccttccttacaccttatacaaaaattaactcatgatggattaaagacttaaacataagacctaaaaccataaaaatcctagaagaaaacctaggaaataacattcaggaaataggggtgggcaaagacttcatgtccaaaacactgaaagcaatggcaacaaaagccaaaattgacacatgggatctaattaaactaaagagcttctgcacagaaagagacagtatcatcagaaggaacaggaaatctacagaattggagaaaatttttgcaatctatccatctgacaaagggctaatatccagaatctacaaagaacttaaacagatttacaagaaacaaacaatcccatcaaaaagtgggcaaagcatatgaacagacacttctcaaaagaaagacatttatgcagccaacaaacatatgaaaaaaatgctcatcatcactggtcattagagaaatgcaaatcaaaaccacaatgagataacaatctcacaccatttagaatggcgatcattaaaaggtcaggaaacaacagatgctggagaggatgtagagaaacaggaaagcttttgcactgttggtgggggtataaattagttcaaccattgtggaagacagtgtggtgattcctcaaggatctagaactagaaataccatttgatccagcaatcccattactcagtatatacccaaaggattatcagtcattctgctataaagacacatgctcacgtatgtttattgcggcactattcgcaatagcaaagacttggaaccaacccaaatgtccatcagtgatagactggataaagaaatgtggcacgtatacaccacggaatactatttagccataaaaaaggatgagttcatgtcctttgcaagtacatggatgaaggtggaaaccatcattctcagcaaactaacacaagaacagaaaaccaaacaccgcatgttctcactcgtaagtgggagttgaacagtgagaacacagggacacagggaggagaacatcatacactgggatctgtgaggggctggggggctaggagagggataacattaggagaaatacctaatgtagatggtgggttgttgggtgcagcaaaccactatggcacgtgtatacctatgtaacaaaactgcacgttctgcacatgtactccagaacttaaagtataataaaaaaagaaataaaaatgaagtttgatattatcatttacatatcatctgtagttacttttgtgctacagagtcagagatgagtaattcctgtagacataagtactggccaccaagcttgaaatatttactatctggctctttaccacaaaagtttttcaacatattagagtgttttagagtttgacagtgcatcctttgctatgcactgagtcgtgagctgtagtgagtgcttaaacttaaaatttatgtttggttttatgtgaaagctttgatgaaaaaagatttcaatttgcacaagtatgttaattagatatgaaattaacagttattgcatatatttgtgctggctgccatatggatatacaatatagtacattaattaaaagagcagaaactttggagccagactgctttggttcaaatcctggctctacttttctgtcatctaaggcaagtcacttatcctttgtgtgccccagttctcttaaccataaaatgaggataatattaaaacttgcaaggactaaataaattagcgtatgcaaagcatgtagaaaatgttttccatgtaataaacactaattattactgtgataaccgaagggttccaaaatcaactcaatttttggcctctttaattcattacatagcaatgaagtacaaaggtgtgaatgtgtaatagttgttttcagagtaaaatgggggaaaatgatttcacttaatttgtttctttccctaatgctagcatctccagtggcacagaatataccttttctgttctggtccgcaaaattgtacagaaatgaatgaatggggggaaagctgttgaattggcatctacccaggctacacatttaactccagccagagattaaagtcacagaaaaaaatgttgttaccccaggtcttgccactagtagaaaacatgacctctaaaaaaaattatgcctttttcaaaatatttattactttcaatgccttccctgggatggttactccagctcctgcaaagctctgccttgtagtaataaggggtatccatcagagtttgtgtgccccagcaagtctcctcttcttgcttcttagaaatgcacattttagtataattttctatttatggtatatcattgttcccaaaacacaaagatgattataaatctttttaatctcatatcatatctaacagttatcgtttccttatttttctttttggaaaaccacaaacaagattggtaaatctcaagataaaatttttattcccatttttttcccctgagacatactggttctgttagatctgtcacatatattatgattgatcagcttgcaactaattattgaactcctttgtatgcagttaatatttaccatttaggatatcagctactctaccaggtgctttgcatgtgttgctttgtttaatcctcacagcaacccataagatacaactattattatcaccattttacagttgtgtatagtgaaacacagagaagacaagtaactttttcagctcacacatctggcaaagtaggctgccagggttaaacttgactgtgtctgattctgatattttcaatgactcttattctgcttcctgtactctttttcctacttgtttgaaacacctcagatcccctgggcagagtagatagatgtaattcagggactctggttggatttcaggcagcccaagtgccttggaaagcattttcctggcttagagatgtcaacttcagagatgtgaaatatatgtaaaattagaggagaaaaaaacttatttaatatttttagaattctctagatcctatggataggaaaattgttttaaaagtagtatacctgaataaggtgggccaccctgaacacataccaaggattagctgtcttctagttcccaaatacaatacaactcccccctgcccgaaaaaagttattttataatatcatgctatgtatcttcttgagtattgtgatcattttctcctagaatatcaaatatttgccataactttaataattctttttaaaaggacagagagcatttgttattgagtatgcaggcagtatgctttgaagatagaggtcacatttagtgagggattcgtggtttaatagattggaagaagggattattagatgggatgggtttggtggaatatgtgagttttctaaagtcattaggtgttttatgcatgagaacataaaagagctggggctggaatcaattttattctaatctaacagatgtcttctactcttaagacacctgtgtaatgaaacgtggctttccccatatctccctactttcactccacttaattaatatacgtggctgtacattgacatactatatcatctattcctaatagaggggttttgcttccttagattttaattatcaataacttcattgcagtattctctgctttcttggtttccagctaattgccccacttgttttttgtttgactagttactttcttcttcatttatgacccctgtctgtagcttatcttggcttctactttctcttatgttctcccctgaattcctttacgtatgttaatattaagctgattgtcataatatttataaggttttcactgtctggacttgacgcagtttggaattttcctagcacatctgaagttaaattttaaataccaaacaaagttgtgctggtttgtatagcttaaacaccagcattttaaataaatgcaaaatgcaataaatgttttcagacaggtaattgttgatttgttgtataacattgtattaataatttctcattcctgattaggttaaatttctttacaattcattccaaaaaatacaaagatatctcagtgatacttacagttggtgaatcctttacatttttttttttttttttttgagacaggttctggttctgttacccagtctggagtgcagtggcaataccttgctcactgcagccttgacctcccggcctcaagtgatattcccacctcagttcctcaagtagctgggaccacaggcacatacatgccaccacatccagctaatttttgtagaaattaggttttaccacgttgcccaggctaatactttactttttattgagtcttttttctgtggtgtcaagcttttggtaatttcattgttgttagctatttgtatcaccaatagaagttaagcagagagcaagagaagaaattccaatttgctgtttgtcagtaactggagaggaagtgaggggtgggagacggagaaagatctggctggagagctgtagtttcacctacaaagagtttttttgtttgtttgttttaatttcgttttttcttttaatttggggagcttgttggatgctatagggaggaaaggtggaggagaacttctggtggtaattgttattcaccctgctctgctttagtctctgatagaattagtgtcatggttgatgttttgtggcattttttaagactgcataatccagcaacttatgattccctgttaggcaaggaaccatagctttcagtgtatacttacagagtgactgagacagtatcacttcttctctttatgccttatattcttcatttataaaatggagattatagacttgtccttgaatacctattgaagtaattgcaaaaattccatatgtatttgagtctttgcgaggccttgaacgtagagtttaattaaacaagaccgtactaagagtcttttgtatttatgtgcaagagttttttcctgatggcactattgatcatgttgggaaagcaaggcctggttagtggatttattgtttaggtgttttacagttatgatagttttcatttgctattggccacaggtttgaaaagagtatgaaacaactatgtagaaaattttctagcatctcccagtcccagaaaagcttcatcagccttcaagagtctatgaagtatgactataatgtaatgtgcctgatattttttattgtggtaaaacataatatttatcattatactctgtgtatacatattgtatactgataagtgtataattacactgataagtgtataattcagtgacactaaatatgttaacagtgttgtataaccattaccactatctatatccaacactttatcattatccccaacaaaaactatgcccattaaacaataactcccacccttctacctctccccacagcccctggtaacctactctactttgtctttatgaatttgcctattctaagtacttcatataggtacaattatacattattttccttctatatctgccttatttcactaagcataatgttttccaggtccatccatgttgtggcatatgtcaaaatttaatttctttttatgactgaatattattctgttatatgtgtaggtcacatttgggttagccatttatctcatgccttatattttaatttataaaatggtttcataataaaaggctgtgatttaatatctaaataaaggataaaggaagagtatattttgttagaggggaaatgaattatggaagatgaatgagtagtaatatggcttagcagttttaaatgaggataattatggtctaagttataggggttgttttgaggattaaagagttagtatatgtgtcttaacaacaatgtagtattataacagtataagtgctatttggctgtttgctatcattgttattagttgatgagagcttcgtagtagagatcacaaatgaggcagaccttaatgcaactctgcaggatttgattagaaaaggaattttaaggtaaatgtagagagaaagcagatggcatgtttttacaataagaaagatgtcacactggttaaacacatagtttttgagaccaacagacctgtgctccagtctcagcattgccgtatatttactgtgtgacttggaatataatctttctaagctttaattgtaatctataatatgtggatatgtgttaattcattcttgcattgatataaaggaatacctgaaactgggtaatttataaagaaagtacgtttattttgtcacatgatccgggaggctgtacatgaagcatagcaccatcatctgcttctggtgaggaccccaggaagctttcagtcatggcagaaggtgaaggggagccagcgcatcacatgatgaaagagagcaagcagggtggagaggcaccacactctttcacacagccagatctgtgaacctagatgagtgagaaatcactgatcaccaaagggatggtgctaagccatttatgagggtctgccccccatgacccagtacctcccactaggccccaccccaacactggagattatattttaacatgagatttggagggaacaaacatataaaccgtatcaggataataatgataacatcaaagtattattatgaggattaaaatgagtaagacacttggcatgttacctggcaatgacaaaaaactttcaaacagtgatagcctctattaatttaatacttttggtggttaccattttttatcattgttagcattatccacattggctcatagtgggtgacacctttggaaaggtattagggaaataaagaaagaggagttgtaagtgattatggcatacctttaaaataggagtgtgcacttgaatttaggcagtgggatgccactaaagttttatttgagagaaagactgagtgtgtgtgtgtatttgtgtgtttgtgtaagtgtgtgtacatgtttgtgtattttggcaggaacattaataagaagaggggccttgctgaaagcagtgatttgtaaagatctgtttacactatgcagataatttgggatttggaaaagaatagataaacaaaagggaacaaaattgcttatacaatttttaacagttagaaggaaattagtaagagaaaaaaatctgaagaaaaatgtttacatgtgttgggtatttaattgtatgccaggcactttgctaacctctctatgttgattactaccatttcatgttcacagtaaccttataatggaagattctattattgtctccattttatagatgagaaatcaaggacataaagtggttacggtcacacagatagtgtggcagagacagctagtgtccccaaatcctttctcaccttttccccatactaacaacattttcatctgggcatgtgatgactccaagtgaaaaaccacatttcttaatctcctttgtagtgaagtatgactgtgttgtgcaccccacccagccctcaaaaaaagagttgtgaataattttggagaactttgagagttggcttgtaccatctgaccttcttcccttccttattctgccttcctcctgttacagacatgtgacagtcatagctcatcttagatcatgaaggccagggctgcacggtagaatggtagagcgtaaagcagggagggagctggatccctatggaacttggaaaacagagcatccacaccaatcctgtactgccaacctttgggcatttacattagaaagaaaaataagctgctctctggggtttcctcttactttttcacctgacacgaatccttactaacaaagatcagagggcactctcatccacagtgtatactctttaccttggctactctcagatgcccaacagtttttataaggaattgtaaagatctaactcttgtattgtatagctcagaaagccaaatttactgaagttaggcccatgtccagagatggattcaagaattcagtggtgtattttctcagctttcttgagtaaaaattaacgaagtagagaagtttgaaagctctgctgcttcttccttctgctagacaaggttgtttgcatttctttttactttgcataaatatctctaattttgagaaaagtaaccttagcagataaggaaagaagttgaagggtagtttgtttaattatcaagagcaatgatgtataaatggcttttgggaaaaaatgatatctaactttaagttaagaacctgtgtagttattatggaatgaagtgaattctgtaaaaccattgatataaggtaagtgtgcttttagatgctgcatgttattctatgatttttattttgagcaataacaaaaagatgttgaaattataccagttgaccagttgctgacaggcaatcctaaagtattggctggaactgataagaggttaccagcattacatattcatagatattctcaacttgaagtactttctaaagcaaacagttctgtcatcatcactatgcatagaggtataacggtgatgcagggtggttttcagatagactaggtttttattttgcctctatactggacaggttgagtgaccacagagctttatatcttagtgactagtggttaaagagattgcatttgcattatcctaagtgaattagcacaggaacagaaaacctaccactgtgtgttttcacttataagtcggagctaaacatttgatacacacgaacataaatatggcaacaatagacactggggactgctggagaggggaagaggggaggagagtaaagattgaaaatgaactgttaggtactatgcttactacctagaggatgggattaatcatacccccaatctcagcattgtgcaatatactcatgtaacaaacctacacatgtcccctctgaatctaaaataaaagttgaaattataaaaaataaataaaaagacaaaaaaactatagtgagatatcatctcatcccagttaaaatggcttttataaaaaagtcaggcaatacccaatgctagcaaggatgtggagaaaagagaacccttgtacactgttggtgtataaaattagtacaaccaccatggagaacagtttagagattcctcaaaaaactaaaaatttagttgccatatgatgcaccaattccactgctgggtatatacccaaaagaaaggaaatgagtatatggaagagatacctgcacttccatgtttgttgcaatactgtttacaatagctaagatttagaagcaacctaagtgtgcatgagcagatgaatggagaaagaaaatgttgtacatttccacaatggagtactagccagacataaaaagaaggagatccagtcatttgcaacaacatagatggaactggagatcattatgttaagtgaaacaagccagacacagaaagacaaacatcacaggttctcacttatttttgagatctaaaaatcaaaacaattgaactcatagagagagaatagaaggatagttaccagaggctgggaagggtagttttgggaggcagggttgcaggggaggagggatgggcaaaaaaaataattagaaagaatgagtaagacctagtatttgagagcaccacagacactatagtcaataataatttaattgtacactttaaaataactaaaatagtataattggattgtttgtaacagaaaggataaatgcttgagggggatggatacccagttttccatgatgtaattattactcattgcatgcctgtaccaaaacatctcaattaccccataaatatatacacctactgtgtacccacgaaattaaaaataaaaaaatttttaaaataaattatatttcataatcagtggtgtatgcatgcaatataaatgcttgttcctagaggatttcaagatcatatggtctttctaagtcacatactataccaaagctcttcagacaagagcttcttatacagtctgaatttgtgcagaatctcaaaagggcaataaaattttgaaataatgtgattaactccaaattcattacgaattatgtagtttccgtgctgggaaccaaatgaattataaagtatgtttacactgcttcaacacggtggctccattttagctgcaaacagaaattcttatcatttttttcaggattagtcccaaatactcaagtttaagttatcctaaatctttctttaggaacgcctcacaaataaaatataagaaattttgatattgtactcttggcaaagttttgctctgcttccctaatctaatgggacagtgacagcttacaatgaaacattttcaaaaacattccctgctaaatcaaactgaaatgcaggggatttacatggacatttgagatcgtttggtgtaatagagcatggactgtcaagtaagaagtttcacatggactacggagtaagaccagtccttctaccatcttggaacttgacctttttttgtaaaattggaaacataacagctcaccatcttgttgagaagactaaatgaagtaatgtgaaagttccttaaggaagaaatgttaaatgttattacgcttgacctgttttcttgttaacatcttatatcttgaaattttctttaaagcctctaaatgttgtttttgtttgtttgtttgttttgacggagtcttgctcagtcaccccaggctggagtgcagtggtacaatcttggctcactgcaacctctgcctttagggttcaagcaattctatctcagcctcctgagtagctaggactacaggcatgcaccaccacgcccagctaatttttgtatttttagtagagacggggtttcactgtattggccaggctggtctcgaactcctgacctcgtgatctgccctcctctgcctcccaaagtgctgagactgcaggcgtgagccaccctgcccagccaacgttgtgtttttaaatacgttaaagttacagcatatggttttaaaagcctttatttctccagtcaaatattagaaactcaagaaaaaggatgcactaagttgaaacttgctctactactttggcagccacacttaaggcagaaaagtaagttaaagatcttatacctttgagtttaaaaacaaacagtgatttttctcatttagcagccctgtgcagaatcatagcagaatcatctcatctctcttgggagaaatgttggcagttaattaagccaattccttcattttgtggttaagtgcactcagatccagggattaatcgactttgccaaagtcatttatctagttaactgtagaaaaggcagaacctcttgaattccaagctagtggctatttcacttagctagtatttttaaaatcattgactttagtgtgtatatatatgtatacactatttatgtgtgtatatttttaaaatcattggctttagtgtgtatatacactatatgtgtgtgtatatatgtgtgacatatatacacactatatatgtttatatgtatgtgtgtatatatgtgtgacatatatacacactatatatgtttatatgtatgtgtgtatatatatatataatttgtgtgtgtgtgtatatatataacttttaatgttattttccagtgtcaagagaccatttgaaattaaatctggcttcaaaaaatgttaccatcaaaagtcattaagtgttttctggttttgatatttgtattgcgattatataagagaaggtccttgctcttggtttacacagaaatattttgtgatttaaaaatattaatgattactgcccaccaatttttatgttaggtatttttcaaggcactgggatttttcttttgaaaatcttatccttgagagatttgatctattactatgttatggtatatttttgccttatagtgattatgatttttttctttctgcttctgaaatgtggtagatatgtgtagaaatcataagaaatggccattcttggtgtcaaacttgttttatcttcaattatcataataaactattgaatgcaaaaaaaaaaataaagttgctgagagtagtaagtgcttaacagaaatatttagaaaaaagtaaaaccaaacccagtaaagacctcattaatttaaactctattaaagaaggattgtgaacagtacttgaactgaaatttagttttggatccagaattctatttaattgcctatgcaaaataataatgtgaacaagattagaaagggaatgttttcaatagttaaaagaacaaaatgtctctgagcagccagccttcagtagttgagaatgctgattaacatacacataagaggcatgctaattacgggcagccttatcgggtcattacagcaggtcccccaggacctttctgttactgggtagaacttgaaagtaataaatttgcttttctttacaattattctataattagaaattccacagatttaagccattttctcatggaactgcccttattaaacaattgatttttagcaaatatccacacatttcctgatatataatacaaaatagatactgatatgtgtaaaagaaagatggtgaccctattagaaagcatcatcctttttagtttttccacactcattttgatgagaaactttaaaatcccttttagttttttttaatcgatttacgtctgaaggctcatatcgatcttgttctcaatgaaagtcaacatagtattcttaggtcttaggtctagtctttttattcttcgatgaaacagatagaaatttgtctctcctattgatgaaaagattgaagctttaaacagaagggagataccagtaccattttttcaaagaatatgcccatatttaaattgtacaagttttgtttttctgtgagtacaacaatcagatattaaaatggcatgtttttttaacttaaaaagagtattatgtagttattattatgcacgttgatgtggcactttttctcaactgttagagtattcttcttagatatcattaccaaacaactgattggccatttaattttggtcatatttcacttttcctaatacctaaatggcacaaacagacatgaaaatagtgtaaggctcagacttcattgtacctaagaaatcagtgaagcttttcatcaggtggaaggaagagtagactggattttctcttagatctgtctgcctttttctttgaaaagtttgtttgtttgtttgtttttgagacagagtctcactcttgttgcccagactggagtgcaatggcacaatctcggctcactgcaacctccgcctcccaggttcaagcgattctcctgcctcagccttccgagtagctgggattacaggcatgcgccaccacacctggctaattttgtatttttagtagacacggggtttctccatgttagtcaggctggtcgcgaactcccgacctcaggtgatccacccacctcggcctcccaaagtgctgggattacaggcatgagccatcatgcctggcctcttttaaaagtttttgtagttttttccagatgggataactttttacctggataatatatttggtaaaaaacataccattttccaaagtgtttatatcatttcggttgttgttttgacccttctaattatttagcagctctatccatggagactactgggggaagtcttgagttttgcctattcatggaaggcaggaagtaagccagaaggaacctcattccatccccagatttgtttatctgaaagacccatcatcagttgtgaaatgtggaaattttaagcaaggtcttgtatataaattttatagatgggaaaactgttgaaaaaagaaaatgcaactgagagatattactggtatttttgtcattgacaaccaaggataacaattgcattgctcccttgtttgtgatgtatagagacatctatacttaaaagacattttatttgagcaccaaagtaattataaatggtttattgtatttattgtgggatctggccagcagcccgcaatgcagcggggctctctttcttttcccaggcagatcggcaggtcgataaataatagacacacacaagatagtgaaagctgggtccaggagggtcaccgccttctggtcctgcaatgctgccaatgcactggatataccagcatttattattaagtttagtgagggcaggggtaggttagtgagggatttagggttgtttgattataaggtgagatggtcacgtggggatgaagtaattctttaacataacatctgtatgcagaagtacagtatacagagaaaagaatttacagtatagtgtgtgcatcagtaatttctaacagagccttaaaacagaaacacagtctttccgtaacctatgatcagcaagatattaatcagcagtaacagttgcagcaaaagctggttacaaacaatccatagaaacaggatgtgaggctagacaactggttagaccagaaatactcagaagggagtatgccttaaccctaaagaggcctagaagagccatggcaagatgagggcatttatagccctatcttatccacatgaacaggcgcccctcatgcgtccgtttataggctctccacaagggtcacattccctcatgcgtccgtttataggctctccacaagggtcacattccattcccagagctatgaacatctgcttttctgggataggaatcttggtgatgtgaaacctccctgactgcacatccattcataggctctctgcagggggaagcaaatcacacgctgttggctcattctggcagtccaacctggcattgtctttacacaatcctgcatgcaattttatatttacaataatcagaagcatttcatcttttattccatagcagtagtttcagggggtctccctacatatatttataactttttccctatttatttatgctgtttatgtttaagtatggttccctgagagctcacctgatatatcacactgctgaaactgagctagatctctaaagctttctccagatttaacatcctatgattcactgactgtgtaaattaattctaaccactgatgttgaaaatgtcttctcatggatctgtaaaggttatgcagaaaaatctagttgctaaataacggagctatcttcaggaatgaaaactggtaaagaatattattggctgggtgcagtggctcatgcctgtaatcccagtgttttaggaggctgaggtgggaggattgcctgatgcctggagttccagactagcttgggcaacataaccacatcttacataaaacaaaaaacaaaaaactagctgggcattgtggcatgcacctatagtcctagctactttagaagtctgaggtaaggaggaccccttaagcccaggagttagaggttacaatgagctatgatagctccatgatagcaccattacattccagcctgggtgacagagtgagaccctgtctgttagggggaaaaaatacacacacacacacacacacacacacacacacacacacacacacacacacacacattgagagtcagtgatatgtatagtcaatggaagaatttagtcaatataaatatatttatatatatatatagtcaatataaatatgtacatatagtcaatggaagaatttccatacatttttggtccctaagtgtacaacttcactgggttattaaaaatattaaaaaacacctataaagtgcttagaacagtacctggcaaccttgtaagtgctatgttaagtgtttactgttactgccaccaacaccactgaggatccagcagaggattctatgataagttgtctttgtcctaaaaatagtatatcctcttgcagtcattggaaataatatggccagtaatctaaaatatatagtttcctagtagctataggctattttgaagtcattctaaaaccaaccattaaacctgagcgtaatctgtttaacacatgaagaaagctgtttcataagactctgaaagagatttataaaatgaaaatgctgtggcatcaaatattaatattttgctagcagcaggtagcccaaatgttgatggctggtatgcatttgaaggcctacttaactgtgaattttattaggaccattcctcagagctggagttacaaatgggcttataaatgagaaattaaccacccctctagggaacagcagtttctttgaaatcttaattaaccaatcacactgatcttctcttttttcaattgccaacacttggataaatgttgaataaaacattgtctaattggaaatagcttaagtactgggaacaccattcttttatatgttgaaataagtatagtggtaaaatgaaataaattttaaaaagtagtgcatatgtgcctgtttgaatattttcatttgtccactatacttttaaaaaaattaaactgtaaaaaaattacattgtgaaactaggtttttttcttttttctttattgagacagtctcactctgacacccagggaggagtgcagtggtgtgatcaggactcattgcagccttgacctcccaggctcaagcagtcctcctgcctcagcttcctgagtagctgggacaacaggtgcacagtactatgccctgctaattttttgatttttttatagagaggagatctcactattttgccctggctggtttcaaaagcaattttcccaccttggcctctcaaagtgctgggattacaggtgtgagttaccaagcctaggcagaagttgttttttttttaattggaaaataagcataagaaacataggatgtttcatgttcagaaagaccattacttacaatatgactttgtagtatcactttattttcttccacacagaacattacaagtagaggcaacacatttgtgaagaggttaattttaacaaaatataaataaactgatccactgtaaagtgttacctagaaaagatagtttatgtagtggaatggaaatacatatataggtgaaaatttaatgacctttctaattgaattttttgaagaaataaacattgtattttctaagataaattcttctatgttatattattactttattaaaatggatactgcagtcaatatgattttcttaaatttataagaacatagagaagatagttttgtgaacagttaggtctcccttaggcttattatttctttgaaattgttttatttgtgctgtatagttttcatacatatgagactttccaataatagctattgaatggaaaaaatacatatagaacacagtcatttaagtcgctcaaatttctagaaataaaatatggagacctgctttcccaaatatatttgctatgtcctttttcagatttagcaaacattatgccttctatatgccatacacatttgcatagttatatttaatgttgagtacaatgttgtaaactggagatatgtgtttcaagcagaaggaataacatgtaggtacaaagggatttgattataatgagcatggcacgttggatagggtcagagagtttttaatgctaatcagtgggaagggagttggagaccagatgactagtaggctaaaatgatgggttagggcagttcctgttggacattgaatggcaaaggggagtccacaagagtttatattttattcttttgtctgagggtccttgaatgggctttagtccattgtgaatctctttaaattacgtatgtgtatgtgtgttagtatgcatatgcacttgtacgtccgcatccactgaacacacgtgctgtggaaagggtttgtagttttcattagattctgtaattccacaaagttaagaatcactgcagtagatatgacacatcctattagagattctaattatgtgatgatggagtaagaattgttggttgtttgctttttaagaaagatcattttggcagcaagaccacaggtcactatctcacatcatatacaaaaatgaactttaagagctaagactgtgatgctcttcgaagaacacaaaggggtaaatcttcatgactttggatttgttttgttttgttttgagatggaatctcactctgttgcccaagctggagtgcaaggcactatctcagctcactgcaatctctgcctcccaggttcaagcaattctcctgcctcagtctcctgagtagctgggattacagtgtgtgccaccacgcccaactaatttttctatttttggtagagacagggtttcaccatgttggccaggctggtcttgaactcctgacctcaggtgatctgccttgcctcggcctcccaaagtgctgggattacaggcatgagacaccgtggccagccatgactttgtatttaatagtggtttattatatatgaaaccaaaagtacaagcagcaaaatataaaacataaactggacttccttaaaacttaagacttgttgtattaaacgacatcatcaggaaaatgaaaaggcaatctagagaagaggaaatttgcaaatcatatctctgataaagattgagtattcagccatttgacccagcaatcccattactgggtatatgcccaaaggattataaatcgtgctgttataaagacacatgcacacatatgtttattgcggcactattcacaatagcaaagacttggaagcaacccagatgtccaacaatgatagactggattaagaaaatgtggcacatatacaccatggaatactatgcagccataaaaaatgataagttcatgtccttcttagggacatggattaagctggaaaccatcattctcagcaaactatcacaaggacaaaatctaaacactgcatgttctcactcataggtgggaatcgaacaatgagaacacatggacacaggaaggggaacatcacacaccggggcctgctgtggggtgggaggaggggggagggatagcattaggagatatacctgatgttaagtgacgagttaatgggtgcagcgcaccaacatggcacatgtatacatatgtaactaacctgcatgttgtgcacatataccctaaaacttaaagtatagtaaaaaaaaagattgagtattcggaatatatcaataatttttataactcaataaaaatgtaacccaactgaaaaattagaatcaatatttctccaaagagaatatttctccaaagaagacatacaaatggccagctagcacatgaaaagatgcttaacaccattagtcatcagggaaattcaaatgaaaaccacgatgagataccacttcacacccactaatatggctgtaatcaaaaagtcgagtgttggcaaggatgtagagaaattgggacccttatacactgctggttggaatgtcaaaatgctgtagctgccttggaaaacagctgacacttcctcaaaagattagatatatagttaccatatgacccagcaattctatttataggtaaatagccaagagaattgaaagcaaagcaacacaaaaacttctacacaaatctatttagcaacattgttcataatagccaaaaaagtggaaacaaccaaaatgttcataaagtgctgaagaaataactcatccattcatagcacatccaaaacgttatagtcatatgaggaatattactgagcagtaaaaaggaatgaagcattgatgtatgctacaacgtggatgtaccttggaaagatgctaagcgaatgaaatgagtcacaaacactacattttatatgattctgcatatatgagatgttgagaataggcaaatttatttgagatactgaaagtagaggctaccaatggcctctgctttcagtaggagaatcagaattattggagggtgatgacaaaaagatacgatgtttattttggaggtatgaaaatgttttaaacctcgacttgtgacaaatatacaactctgaatatgccaaaagtcatggaattgtacgctttaaacgggtaaattttttcgtatgtgaattttatcttaataaatttattttttaaacaaaaagattatttataatatttctgggagacaaagctcaggtcctgaaataaggtaggagcaatagaagtggagcaatgatgatggatttgagggtcaataataagaaacaacaggtaaaatgttttaaattgctttgacactaaaaggaaggagaatgcatatatggtaattcctagatttctggctagcagggctagatagagaatggtgccattaccacagtggggtaggaatatggaaaggaaagaatggtttggggaaaagatgatgagttattgttttaagtaggctgactttgacttagctgtcggacaaccaggtggaggtgctcagtaggcaatttaacatgtaggtcccagactaggtgaggtagctcacacctgtattcctagccctttgggaggccaaggcaggtggattgtttgagcccaggagtttgataccagtctgggcaacatggcaaaaaacccatctgtacaaaaaaatacaaaatattagctgagtgtggtggcacgctgcactccagcctgggcaacagagtaagacttagaaaaataaaaataaaaaatgtagatctgaagcctagagacatgctttgaaaaaaaatcattagtgaacatcttgaagttgaggctttgtgtatgaaaagctgcaaagagatgagatgaaaatcaggcaagaggtattctggagcccatgaaggaagaggttcaagaagaatggagtggaacctggcagtggtgcgtgcctgtagtcccagctactgaggaggctgaggcgagagaaattacttgagccctggagtttgaggctagtctgggcaacacagcaagaccccatctctttaaaaagagagagagatggagggaatgtttagctttgtcagtcgctgtccacttcatacaatatgagtactgaaaaatatcctttgtgcgtggcaattcagaggtaaccttaatgagcagtttcagtggagtgttgagggtataatctagaagggttcaaaggaggatttctttaaagataggatattgttaggtttataaaagacaaacttgttttccctaatccttttatgccttactactaggactttttcctttaatccaagcatttccaaaccatggtgcttcattgtttagaaatcacatgtgctttaataattcaggttggtttttcttttcttaaccaaaaatagcaatgcaaactatggcgtatgtattatacactttattagggatttcaaattatgtaaatctctaaattaacacacaaaaaggatttatatcagattctatttatgaagtcagaaaaattcctttttccagagccttaactcttatatttcccaagtgcttttatgaagaaacagtcattaaggaaaaaatgactgttttattcagtgaagatttcatgtcatctagttagcaaactatactttgtcttagagtcatttgaaggtagttggacttaacacagacatattgaccaaaattacgatcattatatccttattctatgtccatatgtcagagcccatcttttacagatctctcatgattgccctaaaaattccatttcaagggagtcaaaggctctcttctttcctgcccatctgcatctcctaggaagtgagttttggggctccttgaaattctagtgtgttctaagatagtggtgatcaaactttttttaccctccccatacatatatgtatgtttgcctgtgagtcagatgcaaaagttttcagtaattattctatgagatgctatggtattcactatctcttttttccttttcattctgttatgagctaacatgctgagtagtaggtcataatcatgattcaccaatggagactaaaagttcccatagctcatagaggagtcccaggaatggccatgtatttgctaaaccctaatttgttcaccgtgaattcatcttagaagttttaggtgtgatctggcttcctggtaacatcagaatgctctaggagttgcccagtttccagatactagacttattgcccttgtgctgtagagaaagagcaaaagaattttaggcttaataataccttactatgtttactatgtgtcaggtgctatgattggtatagataatatctaatcttaaaacaattttgaaaattagaattagcatcacaattgtggtgggttagtaggggaaatgaagaaaacaaagcttggcgacattgagtaacttgtctaagagtatacagtgtgtaggtggctttaaaacccgagtttttttcacttccataagctttctgaaacaggcattccattatgaagggtcagcctcagtgcttgtccctattgtgcctaaagaagattgagaaacatggggtggggcggggaagtcccaaaatcatcttggatagcctaagcctttatgcattctcactgcttaaatggagaactctggcaatgtcaacataatcagatcactgccatctcaatacaggattaaataaaattgctctcatattttttggcagtctgtgggtaaaaattatctctgagatctgtacaatcatatgtggagttcatttaagccaaagtctataaagaatgtttaagaccatgcccctgtttgtgctttttactggtgtttctctattagcctggagtgataggatcagtccttgttaattataactgatagggaaacatggctaagaaatatcattcttgggtcaggcacagtgtctcatgcctgcaatcctggtgctttgggaggccaaggcaggaggattgcttgacttcaggagtttaagactagcctgggcaacatagcaagactccatctcaacagtgacatttaaaaattagctaggtgacagagtgagcttctgtgtcaaaaaatatatatatcattcttggtgatgggcttggccactttgtaagaaaccttggtatctcagatgatagatagaagaagcaaaaccgtgagcatttttctctgtaatgtttagttgtgaggccaataaacttaacactcttggaggcaggttttaagaacttcttttctatcattttcttcttccctgtttttactcccctactcaaaagatgtatgtgtatgtgtttttttttttaatccctcctacagagagaaaagcttgtggcaaagggagctaaggtataggatgtagcttctccgttaaaatctagtcctgccctgtccaatgtaataaccactagccacatgtattatcaagcacttaaaatgtgaaaagtcagaattgacaagtgttgtaagtataaaatatttcatactatatttgaaagacttagtattaaaaagagaatgtaaaatattaatagtttttaatatagattacatgttaagataatatttcacattcattgaattaaatgtcattaaaatttctcctgttgctttttactttttaaaatgtggctacagtaaaattttaaattatatatttgtcttgcatttgtggttgtattgtatttctttttgacagtattgattctagggcaatactgcagctactctacccagccatgctttggaatacagctcattatctaattttaggaccccccacccaaagagggctaaattttgcccagccttttcttcctgtccacctgctacctcagcttgaaagagtatatagtgctttactggacaggtaaggcacataaaaataaatcaagttttccccaattggaagtgagaacagatggtcttggatggggtgggacaccagactggtagggcccagatccagtagatttgctgaggatattctgtaaagcaacttgaagaaagtataggaaagttcacatttttcccattatgagtacttcagtggttttgtttttgtttgaaatatcaaattcttccaagacagttttgctccttttcagggcactgtttccctgatgcgctaagcatgtgcttagtctgtgtgatatacttccaaagaccaagcccttgataagtccaccctggagtggtggcatggcaagttgtcaatacctgagccttgggagctatactccttcagtggttggttgactgattgcaggcaaaaagatagaagttgccaatgaaaattgtttcaaaggaagtagtgtatcatgtgtgcatgtctatgtgtgtgtatttattaaagaagattctgcttaaattatttctactttaaaattctctattttaaccattgtggaagacagtgtggtgattccttgaagatttagaaatggaaattccatttaacccagcaatcccattactggatgtatacccaaaggaatataaatcattctattaaaaagatacatgcatgcgtatgttcattgcagcactattcacaataacaaagacatggaatcaatccaaatgcccatcaatgatagactgggtaaagaaaatgtgatacatatacaccattgaatactatgcagccataaaaaggaatgagatcatgtcctttgcagggacatggatgaagctggaagccattatcctcagcaaactaacgcaggaacagaaaaccaaacacctcgtgaacagaaaaccaaacacctcgtgttgtaagtaggagctgaacaatgagaacacatggacacagggagggcaacaatacacactgggacctgtcaggggagggtgggtaggggagagcattagggaaaagagctaacacatgctgagcttaatacctaggtgatgggttgttaagtgcagcaaaccaccatgacacacgtttacctatgtaacaaacctgcacatcctgcacatgtaccccagaacttaagaaaaaaaaatgaaattatttttaaaaattctccgtatgtatatatgtatgtatgtatgtattatttattgagatagagttttactctcattgcccaggctggagtgcaatggcacgatcttggctcactgcaacctccacctcccgagttcaagcaattctcctgcctcagcctcccaagtagctggtattataggcatgcacaccacacccagctaattttgtatttttagtacagacagggtttcaccgtgttggtcagtctgatctcgaactcttggcctcaggtgatccatctgctttggccccccaaagtgctgggattacaggtgtgagccactgtgcctggccaaatgatctgttttaaaaagtacaatatgagtgtgatgttccccttcctgtgtccatgtgttctcattgttcaattcccacctatgagtgagaatatgcggtgtttggttttttgttcttgcgatagtttactgagaatgatggtttccaatttcatccatgtccctacaaaggacatgaactcatcattttttatggctgcatagtattccatggtgtatatgtgccacattttcttaatccagtctatcattgttggacatttgggttggttccaagtctttgctattgtgaataatgccgcaataaacatatgtgtgcatgtgtctttatagcagcatgatttatggtcctttgggtatatacccagtaatgggatggctgggtcaaactgttgtggggtggggggaggggggagggatagcattgggagatatacttaatgttagatgacgagttagtgggtgcagtgcaccagcatggcacatgtatacatatgtaactaacctgcacattgtgcacatgtaccctaaaacttaaagtataataataataaataaaataaaataaaataaaataaaatataaaagtacaatatgagaagaaaaatcacgtcttccaattaaataatatacagttaatcaaagagagagcaagaatttgttcaactgtgtaccattataatcagacactataaagggattccaaaagtttgtgggaaaatgcaattaaaagaataaaataatgtgaacttttcttcccaacataagctccatcagggtcaagacactttccaaataaaaagtaatgagtacatagtaggtatatatatttatggggtacttgagatattttgatacaggcatgcaatgcatgacaataacatcaggggaaatgaggtattcaccatctcaagcatttatttctttgtgttataaacattccaattatactctttagatttatttatttatttattattttttgaaacagagtgtcactttgtcacccagactggagtgcagtggcacaatctcgactcactgcaacctccgcctcctgtgttcaagtgattcttctgcctcagcctcccgagtagttgggactacaggcgtgcacaaccaggcttggctaagttttttgtatttttagtagggacagatttttgcaatgttggcccggctggtctcgaacttctgacctcaagtgatccacccgcctcggcttccaaaagtgctgggattacaggcatgagccaccatgcctggcctatttatttatttatttagagacagtcttgctctgtcacccaggctggaatgtagtggcatgatcttggctcactgcagcctccgcctctggggttcaagtaattctcctgcctcagcctcctgagtagccaagattacaggcatgcaccaccatgcctggctaaattttgtatttttagtagagatgggggtttcatcatgttggccaggctagtctcgaactcctgacctcaggtgatccgcttggctcagcctctcaaaatgttaggattataggcatgagccaccacgcctggcccggcctagttatttttaaatgtacaataaattattgttgactgtagtcactttgttttcctgtcaaataatagatcttattcattctatctaactatatttttgtacccattaaacatctccactttgcccccactactcccgctacccttctcaacctatggtaactatcattatattctccatctccatgaattaattgttttgtttttttagctcccacaaatgagtgagaagattgtctttttctgcctgttttatttcatttaacataatgtcttttagttctatctatgttgttgcaaatgacagaatctcattcttttttatggctgaatagtactccattgtgtacatgtaccacattttctttatccattcatctgttgatgaacacttaggttgcctccaaatcttggctattgcaaatagtaccacagtaaacataggagtgcagatatctcttcaacatagtgacctccattcttttgtgaatatacctagcagtgggattgctggatcatatggtggttctgtttttaattttttgcagaacttctatactgttcttcatagtggttgcactaatttacattcccactaacagtgtacaagagttcccttttctccacatccttgtcagcatttgttattgcctattttttggataaaagccattaaaacttgggtgagatgatatctcattgtagttttaatttccatttctccagtgattgatgatgttgagcacttttttatatacctgtttgatacttgtatttcttcttttgagaaatgtttattcaaatcttttgcccatttttaaattggattattagattttttttctattgagttgttggagctccttatatattccggttgttcatcatttgtcagatgaagtttgcaaatgttgtcttccattttgtagattatctcttcacttcgttgatcatttcctttgctgtgaagaagctttttaacttgttaacttgatatgatctcatttgtccattttttctttggttgcttgtgctcgtggggtattactgaagaaatttttgcccagcttgatgtctttgagagtttccttaatgttttcttgtgttagtttcatagtttgaggacttagatttaagcctttagtccacttttacttgatttttatatatgtcgagagaaaggggtctagtttcattcttctgcatatggattattcagtcttcccagcaccatttattgaagagactctcctttcaacaatgtatgttcttggcatgttgtcaaaaatgagttcaatgtagatgtatggatttacttctggattctttattctgttccattggtctatgtgtttctttttatgccagtcccgtgctgttttggttgcagtagctctgtagtataatttgaagtcaggtaatgtgagttctccagttttgttctttttgtttaggatggcttaggctattccaggtctttcatgggttccatcaaaatttacgattatttatttatatttctgtgaagaatgagattgatactttgattcggattacactgaatctgcacattgctttggacattttaacaatattgattcttctaatccatgaacatggaatatctttccattttttgtgacctcttcagtttcttttttttttttttttttttttttttttgtgagccaaataaacttcttttatttataaattaccatgtctcaggtgttcctttacagcaatttaaaatggactaatacacaaagttaatgctctaacaacttttggttaaataaatgaatatgagactgtaaagttattttttaatacctcctttgttttagatgctgtattgtttttttttctttttttttttatttattttttttttattatactctaagttttagggtacatgtgcacattgtgcaggttagttacatatgtatacatgtgccatgctggtgcgctgcacccactaacgtgtcatctagcattaggtatatctcccaatgctatccctcccccctcccccgaccccaccacagtccccagagtgtgctattccccttcctgtgtccaagtgatctcattgttcaattcccacctatgagtgagaatatgcggtgtttggttttttgttcttgcgatagtttactgagaatgatggtttccaatttcatccatgtccctacaaaggacatgaactcatcattttttatggctgcatagtattccatggtgtatatgtgccacattttcttaatccagtctatcattgttggacatttgggttggttccaagtctttgctattgtgaatagtgccgcaataaacatacgtgtgcatgtgtctttatagcagcatgatttatagtcctttgggtatatacccagtaatgggatggctgggtcaaatggtatttctagttctagatccctgaggaatcgccacactgacttccacaatggttgaactagtttacagtcccaccaacagtgtaaaagtgttcctatttctccacatcctctccagcacctgttgtttcctgactttttaatgatcgccattctaactggtgtgagatgatatctcatagtggttttgatttgcatttctctcatggccagtgatgatgagcatttcttcatgtgttttttggctgcataaatgtcttcttttgagaagtgtctgttcatgtccttcgcccactttttgatggggttgtttgtttttttcttgtaaatttgtttgagttcattgtagattctggatattagccctttgtcagatgagtaggttgcgaaaattttctcccatgttgtaggttgcctgttcactctgatggtagtttcttttgctgtgcagaagctctttagtttaattagatcccatttgtcaattttgtcttttgttgccattgcttttggtgttttggacatgaagtccttgcccacgcctatgtcctgaatggtaatgcctaggttttcttctagggtttttatggttttaggtctaacgtttaaatctttaatccatcttgaattgatttttgtataaggtgtaaggaagggatccagtttcatctttctacatatggctagccagttatcccagcaccatttattaaatagggaatcctttccccattgcttgtttttctcaggtttgtcaaagatcagatagttgtagatatgtggcattatttctgagggctctgttctgttccattgatctatatctctcttttggtaccagtaccatgctgttttggttactgtagccttgtagtatagtttgaagtcaggtagtgtgatgcctccagctttgttcttttggcttaggattgacttggcgatgcgggctcttttttggttccatatgaactttaaagtagttttttccaattctgtgaagaaagtcattggtagcttgatggggatggcattgaatctgtaaattaccttgggcagtatggccattttcacgatattgattcttcctacccatgagcatggaatgttcttccatttgtttgtgtcctcttttatttccttgagcagtggtttgtagttctccttgaagaggtccttcacatcccttgtaagttggattcctaggtattttattctctttgaagcaattgtgaatgggagttgactcatgatttggctctctgtttgtctgttgttggtgtataagaatgcttgtgatttttgtacattgattttgtatcctgagactttgctgaagttgcttatcagcttaaggagattttgggctgagatgatggggttttctagataaacaatcatgtcgtctgcaaacagggacaatttgacttcctcttttcctaattgaataccctttatttccttctcctgcctgattgccctggccagaacttccaacactatgttgaataggagcggtgagagagggcatccctgtcttgtgccagttttcaaagggaatgcttccagtttttgcccattcagtatgatattggctgtgggtttgtcatagatagctcttattattttgaaatacgtcccatcaatacctaatttattgagagtttttagcatgaagggttgttgaattttgtcaaaggctttttctgcatctattgagataatcatgtggtttttgtctttggctctgtttatatgctggattacatttattgatttgcgtatattgaaccagccttgcatcccagggatgaagcccacttgatcatggtggataagctttttgatgtgctgctggattcggtttgccagtattttattgaggatttttgcatcaatgttcatcaaggatattggtctaaaattctctttttgggttgtgtctctgcccggctttggtatcagaatgatgctggcctcataaaatgagttagggaggattccctctttttctattgattggaatagtttcagaatgaatggtaccagttcctccttgtacctctggtagaattcggctgtgaatccatctggtcctggactctttttggttggtaaactattgattattgccacaatttcagagcctgttattggtctattcagagattcaacttcttcctggtttagtcttgggagagtgtatgtgtcgaggaatgtatccatttcttctagattttctagtttatttgcgtagaggtgtttgtagtattctctgatggtagtttgtatttctgtgggatctgtggtgatatcccctttatcattttttattgtgtctatttgattcttctctctttttttctttattagtcttgctagcggtctatcaattttgttgatcctttcaaaaaaccagctcctggattcattgattttttgaagggttttttgtgtctctatttccttcagttctgctctgattttagttatttcttgccttctgctagcttttgaatgtgtttgctcttgcttttctagttcttttaattgtgatgttagggtgtcaattttggatctttcctgctttctcttgtaggcatttagtgctataaatttccctctacacactgctttgaatgcgtcccagagattctggtatgtggtgtctttgttctcgttggtttcaaagaacatctttatttctgccttcatttcgttatgtacccagtagtcattcaggagcaggttgttcagtttccatgtagttgagcggctttgagtgagattcttaatcctgagttctagtttgattgcactgtggtctgagagatagtttgttataatttctgttcttttacatttgctgaggagagctttacttccaactatgtggtcaattttggaataggtgtgatgtggtgctgaaaaaaatgtatattctgttgatttggggtggagagttctgtagatgtctattaggtccgcttggtgcagagctgagttcaattcctgggtatccttgttgactttctgtctcgttgatctgtctaatgttgacagtggggtgttaaagtctcccattattaatgtgtgggagtctaagtctctttgtaggtcactcaggacttgctttatgaatctgggtgctcctgtattgggtgcataaatatttaggatagttagctcctcttgttgaattgatccctttaccattatgtaatggccttctttgtctcttttgatctttgttggtttaaagtctgttttatcagagactaggattgcaacccctgtctttttttgttttccatttgcttggtagatcttcctccatccttttattttgagcctatgtgtgtctctgcacgtgagatgggtttcctgaatacagcacactgatgggtcttgactctttatccaacttgccagtctgtgtcttttaattgcagaatttagtccatttatatttaaagttaatattgttatgtgtgaatttgatcctgtcattatgatgttagctggtgattttgctcattagttgatgcagtttcttcctagtctcgatggtctttacattttggcatgattttgcagcggctggtaccggttgttcctttccatgtttagcgcttccttcaggagctcttttagggcaggcctggtggtgacaaaatctctcagcatttgcttgtctataaagtattttatttctccttcacttatgaagcttagtttggctggatatgaaattctgggttgaaaattcttttctttaagaatgttgaatattggcccccactctcttctggcttgtagggtttctgccgagagatccgctgttagtctgatgggctttcctttgagggtaacccgacctttctctctggctgcccttaacattttttccttcatttcaactttggtgaatctgacaattatgtgtcttggagttgctcttctcgaggagtatctttgtggcgttctctgtatttcctgaatctgaacgttggcctgccttgctagattggggaagttctcctggataatatcctgcagagtgttttccaacttggttccattctccacatcactttgaggtacaccaatcagacgtagatttggtcttttcacatagtcccatatttcttggaggctttgctcatttctttttattcttttttctctaaacttcccttctcgcttcatttcattcatttcatcttccattgctgataccctttcttccagttgatcgcatcggctcctgaggcttctgcattcttcacgtagttctcgagccttggttttcagctccatcagctcctttaagcacttctctgtattggttattctagttatacattcttctaaatttttttcaaagttttcaacttctttgcctttggtttgaatgtcctcccgtagctcagagtaatttgatcgtctgaagccttcttctctcagctcgtcaaaatcattctccatccagctttgttctgttgctggtgaggaactgcgttcctttggaggaggagaggcgctctgcgttttagagtttccagtttttctgttctgttttttccccatctttgtggttttatctacttttggtctttgatgatggtgatgtacagatgggttttcggtgtagatgtcctttctggttgttagttttccttctaacagacaggaccctcagctgcaggtctgttggaataccctgcgatgtgaggtgtcagtgtgcccctgctgggggctgcctcccagttaggctgctcgggggtcaggggtcagggacccacttgaggaggcagtctgcccgttctcagatctccagctgcgtgctgggagaaccactgctctcttcaaagctgtcagacagggacacttaagtctgcagaggttactgctgtctttttgtttgtctgtgccctgcccccagaggtggagcctacagaggcaggcaggcctccttgagctgtggtgggctccacccagttcgagcttccctgctgctttgtttacctaagcaagccttggcaatggcgggcgcccctcccccagcctcgttgccgccttgcagtttgatctcagactgctgtgctagcaatcagcgagattccgtgggcgtaggaccctctgagccaggtgtgggatatagtctcgtggtgcgccgtttcttaagccggtctgaaaagcgcaatattcgggtgggagtgacccgattttccaggtgcgtccgtcacccctttctttgactcggaaagggaactccctgaccccttgcgcttcccaggtgaggcaatgcctcgccctgcttcggctcgcgcacggtgcacacacactggcctgcgcccactgtctggcactccctagtgagatgaacccggtacctcagatggaaatgcagaaatcacccgtcttctgcgtggctcacgctgggagctgtagaccggagctgttcctattcggccatcttggttcctccctcctcttcagtttctttcatcagtgttttgtagttcttattgtacagatctttcacttctttggttaagttattcctagataatttatttgtagctgttgcaaattggattcttaaattttaaatttctttttcagattgttcattgttggcatatttaaatgctattgattttcatatattgattttatatcctgtaattttatgtaatttacttctcagttctaataatttcttgattaagtctttaggtttttctaaatataagattatatcatctgcaaagaaggataatttgacttcttccatttcagtttggatgacctttatttctttatcttatctgattcctttagctaggatttccaggactatgttgaataacggtggtgaaagtgggcatctttgtcttgttccagatcttggaggaaagattttcaggttttacgcatatgtagatgtggttcttttctatatggcttttattgtgtgttgaagtatgtttcttctctatccagtttttttaggtttttttaaatttaatcatgaagagatggtgaattttattgaatggtttttttgtatcaattgaaatgatcatatggtctacgtccttcattctttttatatgatgtttatattgattgatttgcatatgttgaaccatccttacatcctggggataaatctcagttgatcatgatgaatgatgtttttaatgtgttgttgaatttggtttgctagtattttgttgaggattttttgtatcaatgttcgtcagaaatgttggcctggaattttctttttttgatgtgtctttgtctggttttgttatcagggtaatactgccctcatagaatgagtttggaagtattcactcctccattattttttggaatagtttgaataggattgatattagttcttcaaatgttttgtaaaattctgcagtgaagccatcattttctgggacttttcttgataggagactttttattacatctcagtctcattacttgttaagggtctattcgagtttttaattttttcctggttcaatcttggtaggttatatgtgtctaggaatttgtccatttcttctaggttttctgatttattggcatatggttgttgatagtagcttctaatgatctttgaatttctgtggaatcagttgtaatttttttttaatctctgattttatttatttgtcttctctctttttttcttaatcttcctacaggtttgttgattttgttttcaaaaaacttttcgaacttttcgaaaaatttttcaaaaaactaaccttttgttaatcttgtgtattgttctttttctctttccaatttcatttatttctgctttcatcttagttatttctttgttctacattttaatgtaggcacttactggtataaactttgctctcagtattgctttcactgtattccagagatattggtgtgttgggtttccattttaatttgttttaaggaatttttgaatttccttcttaatttcttcattgactcactggtcattcagcagcatagtgtttaatttctatgtgtttgtatagtttccaacattcctcttgttgttgatttctagttttattccattgtggtctgagaagataattgatatgatttcaggttttaaaaacattttaggccaggtgtggtggctcacggctgtaatcccagaactttgagaggccgatgggggcagatcacgaggtcaggagatcaaggctatcctggccaacatgggaaaaccccatctctactaaaatacaaaaattagctgggcatgttggtgcatgcctgtagtcccagctacttgggaggctgaggcaggggaatcccttgaacccgggaggcggaggttgcagtgagccgagatcgcatcactgcactccagcctggcagcagagtgagactctgtctcaaaaaaaaaaaaaaaaaaaaatggtctgtctttgagatctatgcactgaggagaagcatatgtattctgcagctgctggatgaaatatctattaggtccatttggtttatagtgctaagtccaatttttttgttgatttttcagtctggatgatctgtccagtgctgaaagtggtatgttgaagtctccaactattactgtattggggtctatctctttcttagctataataatatttgctttatatatctgggtgcttcagtgttgatgcatataaatttataactatttatccttttgtcgaattgacccctttatcattatataatgaccttttggtctcttttcatagtttttaatattgaattctattttatctgatataagtgtagctactcctttttttggttttcatttgcatggaatatcttttcccattcctttatttttagtctatgtgtgtctttattgatgaaatatttcttgtagccaaaagatcattgggtcttttttttatttttttaatccattcagccactccatttcttttgattggagactttagttcacttacattcaatattgttattgataaactaaggacctactcctgctattttgctgtttgttttctggttgccttatgatctttctccctccctccctccctttctctctccttcccttccttccttttcccgttctgttgtttttgtgaaggttctcctctctgatggtgttttaatttcttgccatttttgtgtgtttgtatctgttgtaggtatttcagggttaccacaaggcttgcaaataacattttgtaaccaatcatttaaaactaatgacaacttaacactgcttgtaaaaccaaacgaaaaagcagaaggaaaactaataaaaattcacacttttattcatctctcccactttttaacttcttgttgtttctatttaaatcttattacactatctcttaaaacactgttgtagttatttttgatagttttatcttttgatctttatatggaagatataagtagtttacagaccactgttacagtgttatcatattctgtatttgtctatgtacttcctattagcagtgagttttggacctccagatgatttctttttgcccattaacatcattccctttctgattgaagtacatcatttagcttttcttgtaggataggtcagcaattaatgaaatccctcagtttttgtttgtctgggaaagtctttatttcttctgcatatttgaagtatattttcactggataaaagtttttttttccttcagcacttaaaatatgtcatgccactctcctgttttgtagggtttccactgagaagtctgcagccaaacttagtggagctccattgtatgttatttgtttcttttcttttgttgcttttaggattgtttctttatctttgacctttgggagtttgattattgaatgccctgaggtagtcttctttgggttaaatctgcttggtgttttataaccttcttgtacttgaatattgatatctttctctaggtttggaatgttttctgttattatctctttgaataatgctgtctaccctggtctacctctcactacctcctctttaaggccccatgtattagtctgttttcatgctgctgataaagacatacccaagactgggaagaaaaagaggtttaattggacttacagttcgacatggctgaggaggcctcagaatcatggtgggagacgaaaggcacttcttatatggcagcagcaagagaaaatgagaaagaagcaaaagcagaaacccctgataaacccagcagatcttgtgagacttattcactatacaagaatagcacgggaaagaccatcccccatgattcaatcacctccacctgggtccctcccacaataacgtgggaattctgggagatacaattcaagttgagatttgaatggggagacagccaaaccatatctttctgcccctggcccttccaaatttcatgtcctcacatttcagtaccaatcatgccttcccaacagtcccgcaaagtcttaacttatttcatcattaacccaaaagtccacagtccaaagtctcatctgagacaaggcaagtgccttccacctatgagtctgtaaaatcaaaagcaagctagttacttcctagatacaatggggtacaggtattaggtaaatacatcctttccaaatgggagaaattggccaaaaaaaaggagttacagggcccatgcaagtccaaaatccagtgaggcagtcaaattttaaggctccaaaatgatctcctttgactccacgtctcttatccaggtcacactgatgcaagaggtgggttcccatcatcttgggtagctccacccctgtggctttgcagagtacagcctcccttctggctgccttcacaggctggtgtttagtgtctgcagcttttccaggcacatggtgcaaactgtccgtggatctaccattctggggtctggagtatggtggccctattctcacaactccactaggcagtccccctgtgggcactgcctgtgttgggactttgactccacatttcccttccgcactgccctatcagaggttccccatgagggccccaccctgaagcaaacttttgtctgggcatccaggcatttccatacatcttctgaaatctaggtggaggttcccaaacctcaattcttgactttggtgcacccgcaggctcaacaccacatggaagctgccaaggtttggagcttccaccctctgaagccacagcctgagctgtacattggcccctttcagccagggctggagtggctgggacacagggaaccaagtccctaggccgcacgcagcacaggtaaccctgggcccagcccacaaaactactttttcctccggggcctccaggcctgtgatgggaggggctgctgcgaaggtctctgacatggcctggagacattttccccatggtcttgggaattaacattaggctccttgctacttatgcaaatttctgtagccagcttgaatttctccccagaaaaatgggtttttccaaacactgcatgttctcactcataggtgggaattgaacaatgaaaacacttggacatagggtggggaacatcacaccccggggcctgtcgtggggttgggggcagggggagggatagcattaggagaaatacctaatgtaaatgacgagttaatgggtgcagcaaaccaacatggcatatgtacacctatgtaacaaacctgcacattgtgcgcatgtaccctagaacttaaagtataatttaaaaataaaataaataaataagaaaaatgggtttttcttttctactgcattaggctgcaaattttctgaacttttatgctctgtttcccttttaaaacagaatgcttttaaaagcacccaagtcacgttttgaatgctttgctgcttagaaatttcttctgctagataccctaaatcatctatctcaagttcaaagttccacaaatctctagggcagggacgaaatgccaccagtttttttgctgaaacataataagagtcacctttgccccatttcccaacaagttcctcatctctacctgagaccacgtaagcctggaccttattgtccatatcactctcaggcttttggtcaaagctattcaacaagtctctgggaagttccaaactttcccacattttcccatcttcttctgagcccaccaaactgttccaacctctacctgttacccagttccaaagtcacttccatattttcgggtatcttttcgtcaacgccccactctatgggtaccaatttactctattagtctgtttttatgctgctaataaagacatacctgagacttggaagaaaaagaggtttaattggacttacagttccacattgctgagaaggcctcagaatcgctgggaggctaaaggcacctcttaagtggcagcagcaagagaaaatgagaatgaagcaaaagcggaaacccctgataaacccgttagatctcgtgagacttattcactacaccagaatagcaggggaaactcgtgagacttattcactctgcaagaatagcagaggaaagaccacacccccatgattcaattacctccacctgggttcctcccacaacacgtggaaattctgggagatgcaattcaagttgagatttgaatggggacacagtcagactatatcaggccagtaactcatagatttgcctttttgagcctattatttagatcttgtaggcatgctccattgttttttattattattttttgccttttctgactatttattttcagatacatgtcttcaagctctctaattctttcttcttcttgatcagttcgactattgagagactgatacattcttcagtgtgtccattgaatttttcagctccagaatttctgcttgatatttaaaacttattgtaatctctttgttaaatttctctgataggattctgaattctttttctgtgttgtcttgaagtttgttgtgcttcttcaaaataggtattttgaattctcttgtctgaaaagccactatctctgtttctccaggattggtccttggtgccttacttagttcatttttgaggtcatgttttcctggatggtgttgatgcttatagatgtttgttagagtctggacattgaagagttaggtatttgttttattgtttgcagcctgggcttgtttgttcctgtctttttggagaagattttccaagcattctgaaggaattgagtattgtggcctaagtctttgatcactacagctatatctgcattagggggcatctcaaaccagtaacactatgactcttgcagacttgtcaagatcaccttgatgttctttgataagatccaagataattttctggaacaagaggcaaagactcttgttctctttctttactttctccaaagcagacagagtctccgtctccatcctgagctgcctggtattggcaaaggggtgacacaagcacctggtggctaccatcacttggactgtggtgagtcagacccgaatccagcacagtactgggtcttgtccaaatccggaggcgaccactgcctggtaattgccaatcttcattcaaggccagaactgccattcgggaaccagggccaggaatcaggaaccttaggattctacctcctgctctattctactccacctaagctggcacccccaccacaagacaaagtctttcccactcttttctcttctttcctcaagtataaagagcctgttgtaatggccaccacagctggtattgtgctgggtcacatctgaagccagcacagcactagttctcacccaaagcccacagcaactaccgcctggttacaactgatgtttattcaaggcccatgcagatgatgaatgccgccagaactgggttctcccctacaaggcagcaggttcccttctggcccaggatgtgtctagaaatgtcatcccgagctagatcctgggatgtgggcctcaggacactgcttggtgccctattctactgtggctaagctggtgtgctaattgcaagacaaagtcctttttactctcccctctcctctcctcaagcagaaggaaggagtttcttctggagctgtgagctgtgctgccttgtgttggcgaagagctgacacaagtactcctgggctggcctagctggtgtcttatagcttgtgtgtaccccatgtcctctggctcagggtccagcacagcaccaagacttgaccaggaattgcagtccttgtggcctagactgcctttcatgtttatttaggaccccaaagcactttagttcacagtcggcctagctggaactcagataccaaccactgggaaggatgattcccctctggctgtgactggtctaaatgctccctccattggcactggctgaattctgccatgtgtttcttttgctgtgacagatagcactgagttccaaagcaaagtcccacaatcactgtcctctccctctgcctatcacacatactgtctctctgtgccatgcagctaatgctaggggatagaggtgatgttgttggcaattcaagactgtcttttctaccctcttcagtgcctttttccttgatatgatgttaaaaccaggcactgtgattgtgtacctgatttttgattctcatgaaggtgcttcattatgtggatagttgttcgatttggtattcctgtggaggggataatcattagaggattctattcagccatcttgctccaccaccttctctccagacacttttgtaagtgatgataccagtcatttagtccatccctaaaaaactgaggattctgggaatttaccatgtcaatgccatctttgtaagattattacctaagaaaaatgggtgctctttactttaagagtagaaaacaaaaagaagtcagaagtagccacatcaggactgtaaggtggatgcttaataatgtttcatcaaaactcttgtaaaattaggctgggtacagtggctcacaactgtaatcctaacacttcgggaggctgaggcaggcatatcacttgaggtcaggatttcaccagcctggccaacattgtgaaacccactctctaccaaaaatacaaaaatttgctgggcgtggtggcacatacctgtaatcctagcttctcaggttgctgaggcaggagaattgtttgagcctgggaggcagaggttgcagtgagctgagatcacaccattgcactccagcatgggcaacagagtgagaccctgtctcaaaaccaaaccaaaacaaacaaacaaacaaacaaacaaacgaaactcctcctgtaaaactgaccttgtttgatgggaggaatgagcaggaacacttgtcatggtgaggagggaccctctgatgaagctttcctaggcatttttctgctaaatctttgactaagtgtctcaaaatgctatcataagcagatgttattctttatctctcccagaaagtcaacaagcaaaatggcttgagcatctcaaacacctgttgccatgatctttgctcttgactggtttacttttgcttttactggaccacttcctcctcctggtagctattgctttgattatgctttgtcttcaggattatacttgtaaagccttttttttttaatctcctattacaattcttcgaagaaatgcttcagattttgattccacttgttcaaaatttaattgaaatctctgttgttgtctgaagcggatctggtcacaaaagttttggcacccatcacatggaatatttactcaactttaatttttagtcagatctatataagctgaaccaattgagatgtctgtggtgttggcttttgtttctgcaattaattgttgggccctttcaattagagcacaaacaagataattttgttcttgcaaattgatatggatggactgccactgcaggcttcatctttaacatcatctcattccttcttaaagcgaattttctatttgtaaattgatgatttatttgggggcattgtcctcataaacttttcataaagcatgattgatttcaccattcttacactcagtcttcaccctgaatttgatgtttgttcttgcttcaattttggtggaattaatgttgcactgaaaggggctcttttcaaatttatgttttattcttcttagtgcctcagactagatcctatttagacatgttataacaagttagggagaatttattttggtgcaaatttttttgacattcatgcatagcttttaataatgtacactatccatcaacattttgaagactcctcatatagtatctactagtttatgaaatttcaataaaaatttaaaaccttcagaaaaataattacaaatggctaagtgtagatgttaattgtttaaaatatgcaactcataaattttgatttttcctgaattcatagctgtatataaaggtgcttgtccctagcctgccacacccactgtctttcagattgtgccctgatactccttcacatcattatttgcaatgacaatactagagaaataaattgtccattgataaggcataccacgggtttatttcattatgccaattttaaagctactttcttctgtgaccagaacattttttaagacgttaattggttggtctttatttggcatttgatcagaggagagacagtgttgacaaagcagacattttcagtatctttgtcatttattcactagcgggaatctttatctgttctctgccttcatgtctttggtaacctcagaccagtctggtatatcttaatttgatcttgttttccaagccaaaattcagtttttctgtgcctcacaggcttagtattctcactaatgatgatgtctatccattgttatctcaaagtcctcattttcctctgtcttacagctgagatcagatttttctgattctattcatagcagtatctgtagcttttaactagtatttttgcctcttaattaaataaatgtaacacagctagcgtctgaagtaaaatgtgactagtttatattaaatatggtaactttcataaataaatattaaaacctgtttaatcaagaataaaacccaagtatttatgaagatacttgggaattgcttttcccaacactatgatattagtaatctgggtaggactgccagatgtagcaaataaaaatacaagacacccacttacatttttgtttcatataattaaggactaatttttaatatcagtatgttcaatgcagtattaaattccatgtggtttcactgggcattttatattttaactgtcacccctaaattttcttcataggggcattgattcttgtagtagttgccctactgaaatccttcagtaaaatagaaacaaagagctaacaagttatgaattcttttcatgaaatattatcatgccctccacttatgtaatctttttcccccatcactttgccaaagttgccttcagtctctacgggcagtggtcctgtggtgttgcaatacctgctctcagagggtagggccagaccactcttttgccccacttagcccagtctcatctccatctctccctaactgttgggttacagacattcctctggtggcaaaagcagaggtgtcctctgggctgatacccaggatcacaatgctgcatctttgttgtttaaagactcaaaatcagccaccactcctttgtgctctctgtggctctcaaatttgctgcatttgtgaaaaattatctggtttacactattccagttttatttcagggctgtatcacttacattaggagattgaatacaatatcacagccatgattttcaggaaatactaacttggaagagtgttatttccagtggctatttggataattggagcataacatcctcttcataaagcattttagcctaggctgagttgaataaagatttaagcaaaatgtgtgttttagaaacctgtgtaaaagcttctttggttattctttcctatacatcaggaagatagtattgagaactacagtgtgatgacttgctctagggttacctccaagcaacccttacgaaagtgtgattttgaacaatgagataatttgtttcatgtgggtacaaatgtcgtgaatcatggcattgattatgggagtagttccattggataacattctgccttacaatggattttataaactctcttcctagggagacagctcaaagcatttcgcagggcagatgtgagtgcccaacaaagaaaaatttgccccatcctagctttcatatgtgcctaagtgtgaggcatgactcaccttccacttaagcagcaatataacctttttcttcatactctgcctttctgccttggttcaccattttcttctttctatcatatggatcgtttataataataattattcaacaaatatttgttcagcccctactacatttagggtactagatgtgttactataaggtgctgcctgtagtggccaggagcttatctttcagttagtggaagtaagatatgtcttagcccaaggcaatatgtaaaaaagtattatataagtatatacaacttggtattacagtaagtaacataagggaaaaaggtgtttttacctgggtgttttacattatgaaagcactatggaaggaatctgatgatctgtatagatgagcaagatttcagtaggggaaaatgtgggatggaggatcattcagacagaggaaattacacaaaagccttgaagcttaaagaaaagcacaactttgcagaatggaatgtgattcagatggaatggaataagtcctttttttctatttgagggtaacgggacaatattacagatggatttgaatggtatatgggaacaaaatagtgcttcaggtagattaacctaaaagtactgtacagactgattgaagggcagaaagtttaggaaattgattatttgaaatagtttaggcataaagtgataatatcctgacctattaaaagatggtagtgccaaaaaagaacacatggtttagctggcccaaacaatggttagtttgtctacttagacaatatattgaataatattctctatttttcataatattttcatattgtgaactacttaacacttataccgaattacctcaacactaataatattttcatattgtgaactacttaacacttatgcctaattaccttaacacttataactaatcactatgcaaagtaagaacagtcttgtatatgtaatttgttatcaaccacttaaaactttggaaaaatgaaagagtttttatttgtagaactggttctaaataaaaaggcaaggccagacaaatacctggaaagaaaccttctcttagccctagagccactgaatcaagtcaaaataccttccacaaatggcaacttaatacttaaggaataagtgaagttacttttacagtttcttaacagcagttgcattttctttctttttattacaaattcagactttaaaattgttctcttagctgcatgagagtcaattaggaaaaagttacataaaaatcattgttcctcatgacatacatatcaaaagcaaaaatgtatattgattaaaggggtagaagggaatttcaaacgagaggaggactgtaaccataaactgtttctgtctcatatggtattaagaacagcaaagaacctgagcctgttaagcactataatccagaggtacactgaatgggaattttctgatccttacctaaccttcatgtcaatctactacttcaagctatttttctgtgaaaaagttaacatgtaaactaagacagatacctgagatttaaaaacaaaatctattgtaatttgcttctaacagtgttttatacaccttaattatgtaattcatctgtcactttaataagagtgattttaaaataatgcagggattgaatgtatctttatcttttgtacttcttttcatataaaatgaagtaaagctcaatgagcaaaccccaaacagttttttaaattattttggatgaatcaaataatagtaggattttccatttctgttttaagatagagatccattttgttttgttcatagtttatataatatgtaaaattatttttatatatcatctttgatattagaaaagacattttggtatgcgttttttttttctttttttaaatttattttattattattatattttaagttttagggtacatgtggacaatgtgcaggttagttacatatgtatacatgtgccatgctggtgtgctgcacccattaactcgtcatttagcattaggtatatctcctaatgctatcccttccccctccccccaccccacaacagtccccagagtgtgatgttccccttcctgtgtccatgtgttctcatagttcaattcccacctatgagtgagaacatgcagtgtttggttttttgtccttgtgatagtttactgagaatgatgatttccaatttcatccatgtccctacaaaggacatgaactcatcattttttatggctgcatagtattccatggtgtatatgtgccacattttcttaatccagtctatcattgttggacatttgggttggttccaagtctttgctattgtgaatagtggacaataaacatacgtgtgcacgtgtctttatagcagcatgatttatagtcctttgggtatatacccagtaatgggatggctgggtcaaatggtatttctagttctagatccctgaggaatcgccacactgacttccacaatggttgaactagattacagtcccaccaacagtgtaaaagtattcctatttctccacatcctctccagcacctgttctttcctgactttttaatgatcaccattctaactggtgtgagatagtatctcattgtggttttgatttgcatttctctgatggccagtgatgatgagcattttttcatgtgttttttggctgcataaatgtcttcttttgagaagtgtctgttcatgtcctttgcctattttttgatggggttgtttgtttttttcttgtaaatttgtttgagttcattgtagattctggatattagccctttgtcagatgagtaggttgcgaaaattttctcccattctgtaggttgcctgttcactctgatggtagtttcttttgctgtgcagaagctctttagtttaattagatcccatttgtcaattttggcttttgttgccattactttttgtgttttagacatgaagtccttgcccatgcctatgtcctgaatggtattgcctaggttttcttctagggtttttatggttttaggtctaacatttaagtcttttatccatcttgaattaatttttgtataaggtgtaaggaagggatccagtttcagctttctacacatggctagccagttttcccagcaccatttattaaatagggaatcctttccccattgcttgtttttctcaggtttgtcaaaaatcagatagttgtagatatgtggtgttacttctgagggctctgttctgttccattggtctatatctctcttttggtaccactaccatgctgttttggttactgtagccttgtagtatagtttgaagtcaggtagcatgatgcctccagctttgttcttttggcttaggattgacttggcgatgcgggctcttttttggttccatatgaactttaaagtagttttttccaattctgtgaagaaagtcattggtagcttgatggggatggcattgaatctataaattaccttgggcagtatggccattttcacgatattgattcttcctacccatgagcatggaatgttcttccatttgtttgtatcctcttttatttccttgagcagtggtttgtagttctccttgaagaggtccttcacgtcccttttaagttggattcccaggtattttattctccttgaagcaattgtgaatgggagttcactcatgatttggctctctgtttgtctgttattggtgtttaagaatgcttgtgatttttgcacattgattttgtttcctgagactttgctgaagttgcttatcagcttaaggagattttgggctgagacattggggtttctagatatacaatcatgtcatctgcaaacagggacaatttgatttcctcttttcctaattgaataccctttatttccttctcctgcctaattgccctggccagaacttctaacactatgttgaataggagtggtgagagagggcatccctgtcttgcacctgttttcaaagggaatgcttccagtttttgcccattcagtatgatattggctgtgggtctgtcatagatagctcttattattttgagatatgtcccatcaatacctaatttattgagagtttttagcatgaagcattgttgaattttgtcaaaggccttttctgcatctaatgagataatcatgtgatttttatctttggttctgtttatatgctggattacatttattgatttgtgtatattgaaccagccttgcatcccagggatgaagcccacttgatcatggtggataagctttttgatgtgctgctggattcggtttgccagtattttattcaggatttttgcatcaatgttcaccaaggatattggtctaaaattctcttttttggttgtgtctctgcccggctttggtatcaggatgatgctggcctcataaaatgagttagggaggattccctctttttctattgattggaatagtttcagaaggaatggtaccagttactccttgtacctctggtagaattcggctgtgaatccatctggtcctggactctttttgattggtaagctattgattattgccacaatttcagagcctgttattggtctattcagagattcaacttcttcctggtttagtcttgggagagtgtacgtgtcaaggaatgtatccatttcttctagattttctagtttatttgcgtagaggtatttgtagtattctctgatggtagtttgtatttctgtgggatcggtggtgatatcccctttatcattttttattgcgtctatttgattcttctctcttttcttctttattagtcttgctagtggtctatcaattttgttgatcctttcaaaaaaccaggtcctagattcattaattttttgaagggttttttgtgtctctatttccttcagttctgctctgattttagttatttcttgccttctgctagcttttgaatgtgtttgctcttgcttttctagttcttttaattgtgatgttagggtgtcaattttggatctttcctgctttctcttgtgggcatttagtgctataaatttccctctacacagtgctttgaatgtgtcccagagattctggtatgttgtgtctttgttctcgttggtttcaaagtacatctttatttctgccttcattttgttatgtacccagtagtcattcaggagcaggttgttcagtttccatgtagttgagtgattttgagtgagtttcttaatcctgagttctagtttgattgcactgtggtctgagagacagtttgttttaatttctgttcttttacatttgctgaggagagctttacttccaactatgtggtcaattttggaataggtgtggtttggtgctgaaaagaatgtatattctgttgatttggggtggagagttctgcagatggctgttaggtctgcttggtgcagagctgagttcaattcctggatatccttgttaactttctgtctcattgatctgtctaatgttgacagtggggtgttaaagtctcccattattattgtgtgggagtctaagtctctttgtaggttactcaggacttgcattatgaatctgggtgctcctgtattgggtgcatatatatttaggatagttagctcttcctgttgaattgatccctttaccattatgtaatggccttctttgtctcttttgatctttgttggtgtaaagtctgttttatcagagactaggattgcaacccctgcctttttttgttttccatttgcttggtagatcttcctccatccctttattttgagcctatgtgtgtctctgcacatgagatgggtttcctgaatacagcacactgatgggtcttgactctttatccaatttgccagtctgtgtcttttaattggagcatttattccatttacatgtaaagttaatattgttatgtgtgaatttgatcctgtcattatgatgttagctggtgattttgcttgttagttgatgcagtttcttcctagcctcgatggtctttacaatttggcatgattttgcagtggctggtaccggttgttcctttccatgtttagcgcttccttcaggagctcttttagggcaggcctggtggtgacaaaatctctcagcatttgcttgtctgtaaaggagtttatttctccttcacttatgaaacttagtttggctggatatgaaattctgggttgaaaattcttttctttaagaatgttgaatattggcccccactctcttctggcttcccccactctcttctggcttgtagactttctgccgagagatctgctgttagactgatgggcttccctttgtgggtaacccaaccttcctctctggctgcccttaacattttttccttcatttcagctttggtgaatctgacatttatgtggcttggagttgctcttcttgaggagtatctttgtggcattctctgtatttcctgaatctgaatgttggcctgccttgctagattggggaagttctcctgaataacatcctgcagagtgttttccaacttggttccattctccccgtcactttcaggtacaccaatcagacgtagatttggtcttttcacatagtcccatatttcttggaggctttgctcatttctttttattcttttttctctaaacttcccttcttgcttcatttcattcatttgatcttccatcactgataccctttcttccagttgatcgtatcggctcctgaggcttctgcattcttcacgtagttctcgagccttggctttcagctccatcagctcctttaagcacttctctatattggttattctagttatacatttgtctaaatttttttcaaagttattaacttctttgcctttggtttgaatttcatcctgtagctcggagtagtttgatcgtctgaagccttcttctctcaactcgtcaaagtcattctccatcctgctttgtttcgttgctggtgaggaactgcgttcctttggaggagaagaggtgctctgctttttacagtttccagtttttctgctctgttttttccccatctttgtggttttatctacttttggtctttgatgatggttatgtacagatgggtttttggtgtggatgtcctgttttgttagttttccttctaacagacaggaccctcagctgcaggtcttttggggtttgctggatgtccactccagaccctatttgcctgggtatcagcagcagtggctgcagaactgcggattttcgtgaaccacaaatgctgctgtctgatcgttactctggaagttttgtctcagaggagtaccctgccatgtcaggtgtcggtctgcccctacttgggggtgcctcccagttaggcttctcaggggtcaggggtcagggacccaattgaggaggcattctgtccattctcagatctccagctgtgtgctgagagaaccactgctgtcttcaaagctgtcagacagggacatttaagtctgtggaggttactgctgtcttgttgtttgtgtgtgccctgcccccagaggtggagcctacagaggcaggcaggcctccttgagctgtggtgggctccatccagttcgagcttcccggctgctttgtttacctaagcaagcctgggcaatggtgggcgcccctcccccagcctcgctgccgccttgcagtttgatctccgactgttgtgctagcaatcagcgagactccgtgggtgtaggaccctccgagccaggtgcaggatataatctcctggtgcgccgttttttaagcccgttggaaaagtgcagtattcgggtgggagttacccgattttccaggtgccgtctgtcacccctttctttggctagcaaagggaactccctgaccccttgcacttcctgagtgaggcaatgtcttgccctgctttggctcgcacacagtgcgctgcacccactgtcctgtgcccactgtctggcactccctagtgcatgaacctggtacctcagatggaaatgcagaaatcacctgtcttctgcgtcgctcatgctaggagctgtagacagagctgttcctattcggccattttgggtgccccccgttggtatgcggtttgctgtgaaattttggtttggaagtctgtgaatccttgtcattatctttggttatggtacaaattattagcttttgctactcctgttgtctaaatgatgttgggagagaatttaaacttcaaagcaaacattttaaaacttgagtctgtctccatcttggggaatagatggttaccctgcctgcttctctaattctgatttattcagtactcatttacctagtgcctactaaagtctcaggcaccagggaaacaaagtaaataagaattggtcatggtcgacctagaggtggcaatcaaatgggggtattcagacatggacactagttaattaaaatagcagagtgaaagcctagaggacgaattgattaagtgaggaaaagggagacaagacttccaaaataattatttgtatgtcagcttagtgatgggagtggaagttcactccattgcggttgagaataaaaaggatacttgactatgtggataattctgaattgagttttatacttcagttttaaatgtggaatgaaagttctgttagaccagtaattctcaagtaacagtttgtggccttttgctggtggctacatagacacttgttaaaaatgcagactgcctggaggtactatgttctgaaaaagcatctcacgtgattcttataattagtaaggtatgacacctactttaataaagatccaggagagataaaataaatggtagttgaagtcacaggaatggataagatttcccttgaaagtgtggagagtaagcaaagcagaagacaagaagtaagtagagaaggagccagcaaaggaactaaaaaggaatatactgtgtccagcagctaggatgtatatttacctgagtcttccagttcttagaatggtaatcctcatttctgaattgatatatagagaaaaaatgtagaagaaaaatctctagactgctatttatgatttggctttattctaaaagggattaatcaagtttcagctttgccctatctccaaatattatgcctacttctggaggaagtataatcacaaaatctgtagcagaaacagcaactgaccctctcgaatagtgaaaaatgaagaaagtagagtatcaggaaagaaagttgtaatattaaccaggctttgtaaaacaaaaaatgctccatcatacagttactggatggaatgaggatatttaatttactgaagtgacctttataattgagaactagaactgttatagtctctcaggaacaaatccttctgttcttagccattcctattcttttgtattgatgttgttgtgatccatgcatcttctacttttaggtaactaaaaccttatgttaatggaaatgtgctgttataaaagggcatacaatggcaattatataacctgaattggcataaaaattaattgtctttttcaaaatccacatccccagatagaatacctgttgatcctgaaggatttttaaaacatatacattaccagggggtgcagccaagaggccaaataggaacagctccagtctacatctcccagcgtgagcgacgcagaagacgggtgatttcgcatttccaacagaagcactgggttcatctcactggagagtgtcagaaaatgggtgcaggacagtgggtgcagctagtcaaagaaaggggtgacatatggcacctggaaaatcgggtcactcccacccgaatactgcacttttccaatggtcttagcaaatggcacacctttagattatagcccgcgcctggcttggagggtcctatgcccacggagcctcactcattgctagcacaggagtctcagatcaaactgcaaggcagcagcgaggctgtgggaggggcgcccgccattgctgaggcttgagtaggtaaacaaagcggctgggaagctcgaactgagtggagcccaccgcagcttaaggaggcctgcttacctctgtagactccacctctgggggcacagcatagccaaacaaaaggcagcagattcctcagcagacttaaatgtccctgtctgaccgctttgaagagagtaatggttctcccagcacgcagctggagatctgagaatggacagactgcctcctcaagtgggtctctgacccacgcgtagcctaactgggaggcaccctgcagtaggggcagactgacatctcacacggccgagtactcctctgagacaaaacttccagaggaatgatcaggcagcaacatttgctgttcaccaatatctgctgttctgcagccaccactgctgatacccaggcaaacagggactggagtggaactcccacaaactccaatagacctgcagctgagggtcctgactgttagaagaaaaactaacaaacagaaaggacatccacaccaaaaccccatctatacgtcaccatcatcaaagaccaaaggtagataaaaccacaaagatggggaaaaaacagagcagaaaaaatggaaactctaaaagtcagagtgcctctcctcctccaaaaacgcagctcctcagcagcaatggaactaagctggatggagaatgactttgacgagttgagagaagaaggcttcagacgatcaagctactccaagctacaggacgaaattcaaaccaaaggcaaagaagttaaaaactttgaaaaaaatttagacgaatgtataactagaataaccaatacagagaagtgcttaaaggagctgatggagctgaaaacgaagacatgagaactacgtgacgaatgcacaagcctcagtagccgatttgatcaactggaagaaagggtatcagtgatggaaaatcaaatgaatgaaatgaagcgagaagagaagtttagagaaaaaagaataaaaagaaatgaacaaagcctccaagaaatatgggactatgtgaaacgaccaaatctacgtgtgacaggtgtacctgaaagcgacggggagaatggaaccaagttggaaaacactctgcaggatattatccaggagaacttccccaatctagcaaggcaggcaacattcagattcaggaaatatagagaatgccacaaagatactcctcgagaagagcaactctaagacacataattgtcagattcaccacagtggaaatgaaggaaaaaatgttaagggcagccagagaggaaggttgggttacccacaaagggaagcccatcagactaacagcagatctctcggcagaaagtctacaagccagaagagagtgggggccaatattcaacattcttaaagaaaagaattttcagcccagaatttcatatccagccaaactaagcttcataagtgaaggagaaataaactcctttacagacaagcaaatgctgagagattttgtcaccaccaggcctgccctaaaagagctcctgaaggaagcgctaaacatggaaaggaacaaacagtaccagccactgcaaaatcatgccaaattgtaaagaccatcgaggctaggaagaaactgcatcaactaacaagcaaaataaccacctaacatcataatgacaggatcaaattcacagataacaatattaactttacatgtaaatggaataaatgctccaattaaaagacacagactggcaaattggataaagagtcaggacccatcagtgtgctgtattcaggaaacccatctcacgtgcagagacacacataggctcacaataagggacggaggaagatctaccaaggaaatggaaaacaaaaaaaggtacgggttgcaatcctagtctctgataaaacagactttacaccaacaaagatcaaaagagacaaagaaggccattacataatggtaaagggatcaattcaacaagaataactatcctaaatatatatgcacccaatacaggagcacccagattcataatggaagccgttagagacctgcaagagacttagactcccacacaataataatgggagactttaacaccccactgtccacattagacagatcaatgagacagaaagttaacaaggatatccaggaattgaactcagctctgcaccaagcagacctaacagccatctgcagaactcttcaccccaaatcaacagaatatacattcttttcagcaccacaccacacctagtccataattgaccacatagttggaagtaaagcactcctcagcaaatgtaaaagaacagaaattataacaaactgtctctcagaccacagtgcaatcaaactagaactcaggattaagacactcactcaaaatcactcaactacatggaaactgaacaacctgctcctgaatgactgccaggtacataacgaaatgaaggcagaaataaagatgttctttgaaaccaacgagaacaaagacacaacgtaccagaatctctgggacacattcaaagcagtgtatagagggaaatttatggcactaaatacccacaagagaaagcaggaaagatctaaaattgacaccctaacatcacaattaaaagaactagagaagcaagatgaaacacattcaaaagctagcggaaggcaaaatataactaagatcagagcagaaatgaaggaaatagagacacaaaaaacccttcaaaaaatcaatgaatacaggagctggttttttgaaaggatcaacaaaattgatagaccactagcaagactaataaagaagaaaagagagaagaatcaaatagacgcaataaaaaatgataaaggggatatcaccaccgatcccacagaaatacaaactaccatcagagaatactacaaatacctctacacaaataaactagaaaatctagaagaaatggataaattcctcgacacatacaccctcccaagactaaaccaggaagaactcccattcataattgcttcaaagagaataaaatacctaggaatccaacttacaagggacatgaaggacctcttcaaggagaactacaaaccactgctcaaggaaataaaagaggatacaaacaaatggaagaacattccatgctcatgggtaggaagaatcaatatcgtgaaaatggccatactccccaaggtaatttatagattcaatgccatccccatcaagctaccaatgactttcttcacagaactggagaaaactactttaaagttcatatggaaccaaaaatgaacctgcactgccaattcaatcctaagccaaaagaacaaagctggaggcatcaagctacctgacttcaaactatactacaaggctacagtaaccaaaacagcatggtactggtagcaaaacagagatatagaccaatggaacagaacagagccctcagaagtaacacggcatatctaaaccatctgatctttgacaaacctgagaaaaacaagcaatggggaaaggattccctatttaataaatggtgttgggaaaactggctagccatatgtagaaagctgaaactggatcccttccttacaccttatacaaaaattaattcaagatggattaaagacttaaacgttagacctaaaaccataaaaaccctagaagaaaacctaggcaataccattgaggacataggcatgggcaaggacttcatgtctaaaacacaaaaagtaatggcaacaaaagccagaattgacaaatgggatctaattaaactaaagagcttctgcacagcaaaagaaactaccatcagagtgaacaggcaacctacaaaatgggagaaaatttttgccatctactcatctgacaaagggctaatatccagaatctacaatgaactctaacaaatctacaaacaaaaagcaaacaaccccatcaaagagtgggcgaaggatatgaatagacagttctcaaaagaagacatttatgcagccaagagacacatgaaaaaatgctcatcatcactggccatcagagaaatgcaaatcaaaaccacaatgagataccatctcacaccggttagaatggtgatcattaaaaagtcaggaaagaacaggtgctggagaggatgtggagaaataggaacacttttacagtgttggtgggactgtaaactagttcaaccattgtggaagtcagtgtggtgattcctcaaggatctagaactaggaataccatttgacccagccatcccattactgggtatatacccaaaggactataaatcatgatggtgtaaagacacatgcacacgtatgtttattgcggcactattcacaatagcaaagacttggaaccaacccaaatgtccaacaatgatagactggattaagaaaatgtggcacatatacaccatggaatactatgcagccataaaatatgatgagttcatgtcctttgtagggacatggatgaagttggaaaccatcattctcagcaaactgtcacaaggacagaaaaccaaacaccgcatgttctcactcataggtgggaattgaacaatgagaacacatggacacaggaaggggaacatcacactccggggtctgttgtggagtgagggaaggcaggagggatagcattaggaaatatacctaatgctaaatgacgagttaatgggtgcagcacaccagcatggcacatgtatacatatgtaactaacctgcacgttgtgcacatgtaccctaaaacttaaagtatattttaaaaaataccgaaatttttgtaggtatgtagttattattcaatttttttgaaatgaattagcgactggaatgcattcacttttctttgaagtttcaggtggtactttatgaaaaggaatttccaagatcattttaatagttatgtgatcaacttttcacttaatattcttccttgcactgatctgatacagatttttcacaacctcagtgaacaagtggtaaaatggtcaacagtggttctaatatatttagctttggaggttctacattaaaggttatttttagaaagttttcataattaacacagtcttgaggaactattttattatgaataatattttgttaatgtcagaggaaaagttgaacaatgatacgtatatctaaatagagaaaatttactcgtgagaataccacagtgagatcttcaaattttttgatggccaatttgtggagtctaaccaacagcaagttagggagaacacaatccacactgccctcagttctgacaccagttgtaaattcagggagttaccaaaaccacccttaagttcataattaattaaacatgctcatggaagctgacagaaagctgttatactcatagttacagtgtattacaactatagaatagagattaaagccagccaagggaagaaacacaaagggttgagtccaggagaagcaccaaatatggagcttcctttgtcctctccccatgagtaatggatgttacttttctggcatcagtgtttgataatacacgtggagtactgccagctagggaagctcacccaatccttgttgcccagattttttgttgaggctctgtcacatattacctatgtggctgacctttattctccggcctctctgtaggtaaaacttgtatggcatggtccaaagtcttagtcataaataacattgttagactattcagtgtccaaggcccccatgccttggacccccctcatcaggcatgatgttccatgggctagaagtcacctattactagccagtggcaaaggccaaacttctctttgagtaaggttaatttttcactacactctatgtcattcagatagtaaaagcagatgaaaccaaactggaaccaatggcttaacaaaactgagacttcagagactatgacagatgaaatggctccatattgtccacaggattaagttaaagtgtttgcattgaaaatcacctttctgtatcctggttctctctcaacttgttcttttatgaattcccttctgcagtcaattagagtcacatctactgggcatgccaagtgctttcctgctttggagggtttgtttataccacactcgctgttaatatattcactcatgatctgtaggttttgttgagcccagcccaggccccatctcctgtggaaggccactttcaccactttaccacttttgcagacattctccactgatttcccatagctaacattgcccatatagttttttttggctgttagcatatatttctttccattgatatgtatacctatatcttgtctttacaagttgatcttaagccttttgcaatttaaggaaataatggactatgccctgtgtttttttgagcccccagatcctattacaatgtcttgcacataacaaatgttaaataaatatttgaatgggaagttttcatatagacttgcaagtaggagtatattattcaaatatatgaattaaatcatcttgtaaaaatgatgtaaattatacttataaatttctgaggtaagttaatccagaaaaatattggaatcatttttggcaattcattgaagacactggaaacataaaggtcagaaaaatgatggaaaatggtaagagaagtattgccattccacttccacttcagggcctttcacattgctttcccctctgactgtaacactctttctctaaatatttctctaaataatctcactcagagaggcaaaaccaccctacctaataggtcagccctttcctcactatctctttatcttgccttttttttttttttttggatggagtcttactctgtcacccaggctggagtgcagtggcgcagtcttggttcactgcaacctccgcccccctgagttcaagcgattctcctgcctcagcctcccaagtagttgggattacaggcacctgacaccacacctggctaatttttgtatttttttagtagagacggggtttcaccatcttggccaggctggtcttcaactcctgatctcatgatccacccacctctgcctcccaaagtgctgggattacaggcatgagcaactgtgcctggcctatcttgctttatttttatattactttttactaaccaatcaacattatatgcttaatgtctttcttccctactaccagattataggctccgtagagtcagagacttattcttgctaacagttatatcttctacatctagaatagtgcctgattcttagtaagtgctaagaaaagtttttgttgaatacatgaatgagtttgtactattcagcaaacagaaagcttaatttttatatacgttcactttttgtggggtagtgtgtgtgtgtttgtttgttttcagagtgggccttactctgttgcccaggctggagtgcagtggcatgatctcagatcactggagcctcgcctcctgggctcaagtgatcctcccatctcagcctaccaaggtgctgggattacaggtgtgagccaatgcatctggccttacagtcactttttgtattattcaatttatgaaaacataattgagcttgaagaatttcaaagagaagcatctaaagtgattgaggaagtggtagaatgttttctaaaattactaaaaattattcagcttataaaaataattattaactttggccatatatggatgcacacatggtcaaagttataaaattataaactgtaataattaggttaaaataggcatgtttctcaaaccctagttttatcgaagcactctttaaaagtttttcagagaagtaaaggaatattatttttatacagtggataataaacatggagctctttcttaaaatttgtatgtatttcaaaagagttcaaagagctgttttgataaaaatcacaattttaaagataatgcaaaatgagaaatatttataacttcggaaagtaacagcatggatttcagctatggtgctttatcctaaaaggagttgcaggtttcattattgcctgttgatattaattccaaaaatgtcaagttccccagttgggacaatgaacagtcagcaaccctgagaacgaaggcatatccaaatgtgaccacaggagtattgggtaggtgtaactggagtctaaccccacatgtttgtggtagacagtcatctggaactctgacctagattacttagaatctgtgggaaatccaggctatgcccataggcctcagtgcctcctagtcttatagtctttaaagaatgctttgttctattcaagtattttccactggaatcccagcacttccttcaagaacaaggtacacatcatgaatattgactgctctcgaaatacgcttcgtcctctcctctctacacgcctccctttagttctcattgtagcttctttccctgaagagatttatttctacctgaagctagaatatggcttatatttttgaccattgtgtctggctttgattctgaagtgtttggcagcatttgtgtgcagtgactgggaagcagtttgttcacaatatgattttattgaggttttttcctttgcttctgtatttccacacttaagactccccccaccccatattcaaggaacaaaggctggcaatgatccagcccttttgtattattgtctctagttcatgattttagtagcatgtttgcaactagagtacacttttatattttctcttttcatctctgcctctatggatttttggcaaacatcaaggtgaataaatcagaccgaccactgcaaacccatctgctttcaggaacatgttagcagaccaatttgtgatgttttatcatccaacatagaactaaaggaggctccctgtggagtaagaatagaaggcaaagtctgaggtcaaagagtttttcagctttgaattatttatctgcctactgattgtgctagggacagtctatactggcatttttaatggcactaacagattggtacggtataatacttataaagttgaaatgattttgtggtagatttaaagtgaaaatacagcttatactttggatttgataatagggattaataaaaaaagatgctgtcacagtttttaaaatgtggcaaatcaaggtacacagtgttcatttgacaggatattacttttacacttcagccgctgctaaggttacatttgaaaacagtcttcctcactaaaatacctttctagttgttgacagcccagaaattggtcataaaaaataataggctgtggtcatacaaagctgtcttcctaatgcttgttgacacttcaatgctgcattcatttctttctcacaatgagcaagtaagtgatgattctctttgaaaaagaattaagagaattgcaaacatgtcagtgtatatacgttatactgggagaacagttcatgtaatactcttgataacaggcactaaattgaacctactttaaattgatcaaaagttaagcaagctgcttatatctcatagagttgattttaagctgatcttcaacaagctaaattgtattctctgctggactatgattttatccagtagagatcaatgtctttttttgagaataagtttagtcttactacctaatggtttggaaattaaagagaacccttgaaaggcagatttagtttctctgtgatgataatgtcaagggcatggggtatgggagatgtaactcagtttttcagactttatgacaaacttctttctactttgtgatctgagtcagcttttgtttatagaccaacctgacagaggcaggagaaaggatactctcaagaactttgcctatgagttacattcttggtggtgatggtccagaaaggaggcatatacttgtgatagtggtttttgtcctttccatacatgacttcaactattttttatctttaaaagctaaattctaaagtaatgatggaaatggtgactgctctggcaaatttagattctactgtaccctgtccttcctatccttcttctggacatatttgtgtacatctttctttattgtgtgggttacatgcaaagctggggccagagtgtgtattagttgataaaagcagtactttatctgaatagttgttcactgttgcttttatgaatggattcatagaaaaaagggtaatttaggacacataaaatacatgattggaaattaaacagagtgtgtgtgcattaatccatcattgtgttgtaaatctctaaaggaattggtttcataatcataatgtaacagaaaacagttgtttatttaggtatacagatacagaaggatgtctaaaatgtatattcaccgaaaattttaaacagttgaataatggttcttatggaaatgggaaaaatatttcttgtcattaattaataattttatttatttaacaagtactcagtttatactaggcaatatgctaagtacttcacatacattctaaataatgttattttaagtaacattatgcatttgatattatcatcccattttacacatgaggaaactgtagtttagcaagattaaataacttgtctgagatcctataggaattaagtgaggaaagtggaaatagaatcaatgagtttatctggcttcaaggccattataatatcgtattggactctgaggtacaaaatgggagatacacctgctgagaagtaagttgtggagcaatttatgcgtctagatattagtgaagtggctgccctaaaggaatgacttgttccctcttctcattctggagaaaactggcaggacttagggagcccgtgcatatatgggaatcttctcagaaaatgaattcatatcagttttggttgtgctataaaatgttttcagccatataaaaataaaatatcataagaaagcccttagctccagatatttagatgatgaattattgagcctctttttgtccttcctctttcttcattatatttcttgtaaaaattgaccactacaatcagaataagtctaaaaagaaaggaattaatattgaggagaaaaattgttttgttttccttttgcagaatgttaggttttgtaactttcttgactcaaatatttgttgaatgagtgagtgagtgaatttggatgattagatgtgcattcctgaaacataaactctttctactctcaactgttatgggtaattggaaggtgggttgacattagcttttgcttcaaaaacacaattattttcttttgattttcacaagttcagtacacaatttcattcctattaggctgtttacgagaatctgttctatctgttgacctttacttatatgagatggatcagtgactaatgtagcaaaataccttatttagtctataaagtgaagttctagaaattattcccttagccaaatgagagcactgtataagaagaaaactctaggaacacatatgtattaaacatttaaaagtaatcctaggaaggggaattttattttaattaattttttttttgagacggagtctcgctctgtcgcccagtggcacgatctcggctcactgcaacctccacttcccaggttcaagcgattctcctgcctcagcctcctgagtagctgggattacaggcatgtgctaccatgccgggctaattttttgtattttttagtagagactgggtttcaccgtgttgccaggctggtctcgaagtcctgagctcaggcaatccgcccgcctcagcctcccaaagtgctgggattacaggcgtgagccatcgcgcctggccaggaaattttattaagtaaggacaaggtgattttattttcatttgattttgtcctttatttcttaaatatggaaggtcaagtgtgcatagaaaaaaattactcagtattgaataggagcggtgagagagggcatccctgtcttgtgccagttttcaaagggaatgcttccagtttttgcccattcagtatgatattggctgtgggtttgtcatagatagctcttattattttgaaatacgtcccatcaatacctaatttattgagagtttttagcatgaagggttgttgaattttgtcaaaggctttttcggcatctattgagataatcgtggtttttgtctttggctctgtttatatgctggattacatttattgatttgcgtatattgaaccagccttgcatcccagggatgaagcccacttgatcatggtggataagctttttgatgtgctgctggattcggtttgccagtattttattgaggatttttgcatcaatgttcatcaaggatattggtctaaaattctcttttttggttgtgtctctgcctggctttggtatcagaatgatgctggcctcataaaatgagttagggaggattccctctttttctattgattggaatagtttcagaaggaatggtaccagttcctccttgtacctctggtagaattcagctgtgaatccatctggtcctggactctttttggttggtaaactattgattattgccacaatttcagctcctgttattggtctattcagagattcaacttcttcctggtttagtcttgggagagtgtatgtgtcgaggaatgtatccatttcttctagattttctagtttatttgtgtagaggtgtttgtagtattctctgatggtagtttgtatttctgtgggatcggtggtgatatcccctttatcattttttattgcatctatttgattcttctctctttttttctttattagtcttgctagtggtctatcaattttgttgatcctttcaaaaaaccagctcctggattcattgattttttgaagggttttttgtgtctctatttccttcagttgtgctctgattttagttatttcttgccttctgctagcttttgaatgtgtttgctcttgcttttctagttcttttaattgtgatgttagggtgtcaattttggatctttcctgctttctcttgtgggcatttagtgctataaatttccctctacacagtgctttgaatgtgtcccagagattctggtatgttgtgtctttgttctcgttggtttcaaagaacatctttatttctgccttcatttcgttatgtacccagtagtcattcaggagcaggttgttcagtttccatgtagttgagcggctttgagtgagattcttaatcctgagttctagtttgattgcactgtggtctgagagatagtttgttataatttctgttcttttacatttgctgaggagagctttacttccaactatgtggtcaattatggaataggtgtggtgtggtgctgaaaaaaatgtatattctgttgaattggggtggagagttctgtagatgtctattaggtctgcttggtgcagagctgagttcaattcctgggtatccttgttgactttctgtctcattgatctgtctaatgttgacagtggggtgttaaagtctcccattattaatgtgtgggagtctaagtctctttgtaggtcactcaggacttgctttatgaatctgggtgctcctgtattgggtgcatatatatttaggatagttagctcctcttgttgaattgatccctttaccattatgtaatggccttctttgtctcttttgatctttgttggtttaaagtctgttttatcagagactaggattgcaacccctgcctttttttgttttccatttgcttggtagatcttcctccatccttttattttgagcctatgtatgtctctgcacgtgagatgggtttcctgaatacagcacactgatgggtcctgactctttatccaatttgccagtctgtgtcttttaattggagaatttagtccatttacatttaaagttaatattgttatgtgtgaatttgatcctgtcattatgatgttagctggtgattttgctcgttagttgatgcagtttcttcctagtctcgatggtctttacattttggcatgattttgcagcggctggtaccggttgttcctttccatgtttagcgcttccttcaggagctcttttagggcaggcctggtggtgacaaaatctgtcagcatttgcttgtctgtaaagtattttatttctccttcacttatgaagcttagtttggctggatatgaaattctgggttgaaaattcttttctttaagaatgttgaatattggcccccactctcttctggcttgtagggtttctgccgagagatccgctgttagtctgatgggcttccctttgagggtaacccgacctttctctctggctgccttaacattttttccttcatttcaactttggtgaatctgagaattatgtgtcttggagttgctcttctcgaggagtatctttgtggcattctctgtatttcctgaatctgaatgttggcctgccttgctagattggggaagttctcctggataatatcctgcagagtgttttccaacttggttccattctctgcatcactttgaggtacaccaatcagacgtagatttggtcttttcacatagtcgcatatttcttggaggctttgctcatttctttttattcttttttctctaaacttcccttctcgcttcatttcattcatttcatcttccatcactgataccctttcttccagttgatcgcatcggctcctgaggcttctgcattcttcacgtagttctcgagccttggttttcagctccatcagctcctttaagcacttctctgtattggttattctagttatacattcttctaaatttttttcaaagttttcaacttctttgcctttggtttgaatgtcctcccgtagctcagagtaatttgatcgtctgaagccttcttctctcagctcgtcaaaatcattctccatccggctttgttccgttgctggtgaggaactgcgttcctttggaggaggagaggcgctctgcgttttagagtttccagtttttctgttctgttttttccccatctttggaagttctggccagggcagtcaggcaggagaaggaaataaagggtattcaattaggaaaagaggaagtcaaattgtccctgtttgcagatgatatgattgtttatctagaaaaccccatcgtctcagcccaaaatctccttaagctgataagcaacttcagcaaagtctcaggatacaaaatcaatgtacaaaaatcacaagcattcttatacaccaacaacagacaaacagagagccaaatcatgagtgaactcccattcacaattgcttcaaagagaataaaatacctaggaatccaacttacaagggatgtgaaggacctcttcaaggagaactacaaaccactgctcaaggaaataaaagaggatacaaacaaatggaagaacattccatgctcatgagtaggaagaatcaatatcgtgaaaatggccatactgcccaaggtaatttatagattcagtgccatccccatcaagctaccaatgactttcttcacagaattggaaaaaactactttaaagttcatatggaaccaaaaaagagcctgcatcaccaagtcaatcctaagccaaaagaacaaagctggaggcagcacactacctgacttcaaactatactacaaggctacagtaaccaaaacagcatggtagtggtaccaaaacagagatatagatcaatggaacagaacagagccctcagaaataacgctgcatacctacaactatctgatctttgacaaacctgagaaaaacaagcagtggggaaaggattccctatttaataaatggtgctgggaaaactggctagccatatgtagaaagctgaaactggatcccttccttacaccttatacaaaaatcaattcaagatggattaaagatttaaacgttagacctaaaaccataaaaaccctagaagaaaacctaggcattaccattcaggacataggcgtgggcaaggacttcatgtccaaaacaccaaaagcaatggcaacaaaagacaaaattgacaaatgggatctaattaaactaaagagcttctgcacagcaaaagaaactaccatcagagtgaacaggcaacctacagaatgggagaaaattttcgcaacctactcatctgacaaagggctaatatccagaatctacaatgaactcaaacaaatttacaagaaaaaaacaaacaacccatcaaaaagtgggcgaaggacatgaacagacacttctcaaaagaagacatttatgcagccaaaaaacacatgaaaaaatgctcatcatcactggccatcagagaaatgcaaatcaaaaccactatgagatatcatctcacaccagttagaatggcaatcattaaaaagtcaggaaacaacaggtgctggagaggatgtggagaaataggaacacttttacactgttggtgggactgtaaactagttcaaccattgtggaagtcagtgtggcgattcctcagggatctagaactagaaataccatttgacccagccatcccttactgggtatatacccaaatgactataaatcatgctgctataaagacacatgcacacgtatgtttattgcggcattattcacaatagcaaagacttggaaccaacccaaatgtccaacaatgatagactggattaagaaaatgtggcacatatacaccatggaatactatgcagccataaaaaatgatgagttcatgtcctttgtagggacatggatgaaattggaaaccatcattctcagtaaactattgcaagaacaaaaaagcaaacaccgcatattctccctcataggtgggaattgaacaatgagatcacatggacacaggaaggggaatatcacactctggggactgtggtggggtggggggaggggggagggatagcattgggagatatacctaatgctagatgacgagttagtgggtgcagcgcaccagcatggcacatgtatacatatgtatctaacctgcacaatgtgcacatgtaccctaaaacttaaagtataataaaaaataaaataataataaaataaaaaaataaaaaaagaaaaaaaagaaaaaaattactcagtgttaggcaaatttactctctagatttttttctttttaccaatttttcttttcctgaatcagactattggaaccatttaaacacagcataatgctaaatgcataatcagttcctagggaatacagtccaacgatttctctctcttaatgtcctgaaaagtacaaaaagagttatcctgcgggccaataggcacatatttacccctgaaatatttcagcaatggcagtagtaacatttttattcctcatctttcaggtagtttataagtggaaactattaacttatcggaagagagctcttctgttggagaaaacctggcagtgaaaactttggtttgcctggttaccagatttttgtactcaagactccagacaagataaaagaaatgtttcataatatatcactttatataatacctttatacttaccttattctatacccccaccccaccctgcagttttctttatcattagaaactacatttaccttggcaaatataaattttctctgtatccttttactgaagttatggtgattttttaaggctctattttaattcaggtttagcatttcattcctgtaagccatcagaatttcctctggatcgatttgtaatatgttcaatgtttgctaggaaatttggaagtttttggtttgcttcctctctttctgtatataagatctaattaccacccagcatgaaatagcaactgaaatgaaggcagcaagaaagggtagtggcttaccttagagctaatcaaccacccccttcttgtatacttcgcagctatcaagagaaagaaaaatggcattcattaaaataacatatattaaactttttttctttcttgatttgagactgaagagaaagtttcttcaaatctttatggaaataagacattaagcaattcttttaatttgcaattagtagtctgatgtgaattgtacaaaatattttcaccatcagtgttgctataagtagccccatactattttcttgacatttaaaaagataaacatttctaggaataaaataaaatcaagagaatgtttaatcatttttataaggctagaatttcactcaatttggggttttggtttctaaatttgtcttcaacaaatatctaggcttatctttaaagaagatatcatccttcacacctgtaatcccagcactttgggaggtcgaagtgggtgaatcacgaggtcaggagtttgagaccagcctgttccaacacagtgaaaccccatctctactaaaaatacacacacacaaaaaaaatagctgggcgtggtggcgggcacctgtaatcccagctacttgggaggctgaggcaggagaatcgcttgaacccgggaggcggaggttgcggtgagccaagatcgtgccattgtactccagcccgggcaacagtgtgagactctacttcaaaaaaaaaaaaaaaagagatcatcttaatatagtagcctgtagcttcctgttttgtggaatcagtttgttgggtaattaacctgggaaagattgacagtatttttactttttaaatgaccatggtctgagtttttatcagattgtcagatttaaaaattagataatttgtggtattagacagatgagaaatacatactctactattgtttggagtatgtattggaatgacagttctggagagagagagtacattcatcaaaattggaaatgcatgtaacttttgccttagcaattaaacctcaaggaatttatccttgaacacgtgcataagccatgtataaaatattccttatgatattgtttgttatataaatagaaaaaaatgcaaagaagatggtcattaataggagaatgttcagtaaattatgatatatctatatccagatataccttatttttaaaaagtaaccactcctacagagaataaactatatgtacatgtcttgataaggaacactctatgttatcccattaagtgaaagaaacagtctagtttgcttcaatggagatgtatgtatacaacttccctccatccctgccccttctccccatataaacatacatacacacacaaatatgtatagatagatgggtgaaaagatacaaaggagctgttggtagcacttatcttgggtataggactatgggtctgggatagaagggaagtttttatgtttttctgttgtttacttttcttgctgtttgagttttttaccatgtgtatatattatatttcataactgggaaaaaatttaataaccaggtctattttctttcttttttaggactcagcccaggagagtgttattactcgagatattcatcgtacatttcccgcacatgattactttaaagatactggaggagatggtcaagaatcgctctataagatctgcaaggtaggactctcttcctcactttttctaaattattttacagagctatattttagaaacccatttaaggatttttttactctgtcttcatttcttatttgcactatgccatgttttctgctttgcacacacgctatgagatcctcagtactgatcccagaaggtgacttttcggttgcatgtttcgtgcctcctcatgagggaggaggcgcagcatagcctcagtttggctctcctgctaacaggaaaggaacaaaaggtcctctgaggctatgctataaaagctcaaaagagtcctagatgactctgtccttctgacaagatcatgcagcaattgtctccatttttctgacaacaggcaagtgtaagaatcagtgtgcttattgttgaatactggcaaattattggatgttgttgatatattctgagttacgtcacatcatatatttttgtacggtttttatatcccattttgaaatcttttttctccctcattataagtaggcctggaaaaaacctgtttcctgattttcagtaaatgtgctctgcttggatacagaagattctgtctctgtcagtatagaatagccatcaagttattaattttatcagaaatgcagaatgaagtgtggtgggtatactcacattgttgatatctaacattctaaagagatggttaatgaataatgaactgcacaaaaatttggtaataatatggagaaaaaggcaaacatcatggctaatttgtaagttaggtaatcagttcctgaataatccaatttagcctttgtaatgagtagcaaatattagccagtgtggaattaagaagtatattcacaaatctgtttcattttatatttactgttttttaaaaacagcacttataaaagcactcacttctccagcatttaagaggatgtggagaaataggaacacttttacactgttggtgggactgtaaactagttcaaccattgtggaagtcagtgtggcgattcctcagggatctagaactagaaataccatttgacccagccatcccattacttggtatatacccaaatgactataaatcatgctgctgtaaagacacatgcacacgtatgtttattgcggcattattcacaatagcaaagacttggaaccaacccaaatgtccaacaatgatagactggattaagaaaatgtggcacatatacaccatggaatactatgcagccataaaaaatgatgagttcatgtcctttgtagggacatggatgaaattggaaaccatcattctcagtaaactatcgcaagaacaaaaaagcaaacaccgcatattctccctcataggtgggaattgaacaatgagatcacatggacacaggaaggggaatatcacactctggggactgtggtggggttgggggaggggggagggatagcattgggagatatacctaatgctagatgacgagttagtgggtgcagcgcaccagcatggcacatgtatacatatgtatctaacctgcacaatgtgcacatgtaccctaaaacttaaagtgtaataaaaaaaaaaaaaagcactcacctacatattctaaccaagtaggattaatgtttaattctgcaaatggcacgactttcattaaagtccttgcatgttggtggttttggcctcttcacactcctgtctctttttttcttactttttctctctctcatatttttttatctaaccattttggaggattataaatatatgctgattagaaatctatttttatatgaatgtgtcattcagagctagaaatatataacttataatctgagagtatactgatctttagaaagtgatatatcatctactttgaaaagtaccaaagaccattggatgccacaaaaaaaggtatatgttcattatatgcttgtgaaagacaaaagtaattatttaaaacatttttctactactttgaaattctgcaagctgattaacactggcttttgtaaagaggttaggaaaatttatatcatttccaagtttatttaagagggtctggtttatggcatatgcaacatttttttcccctagcatatagtatattttcagccagtcagtgactttcccttcagcttttctctgattgatactagatactttcttcacataactaaaacagatggttctaatgtgcttgcagcttctgacttaacattttgctccattgtagtaaaaatagtatttgccttgttatgtaatatttagaggggaaataatctgaaacattaccaaacacaaaaataaaagttgaacgattggcacttttaaatagttgatacactttgatttggtgttgcaaataataatgcaaccttgaattcatttgaaaatactcatcagtacattcccagagctcatgtggccattttagattatcagtatacattttacaacatgactaaaccattttaaaactctttctgaatgaagaatattgtaaaatgtatatctgagatactttattatcgaaaagtagcttaaatcacactaaattttgtgaagatgtagaaaacaaaattacattagacatagtattaaataaaagcaataaaagtttttaaggattttaatgctgtactgagctgtatatacataaaaataatttcacaacagtctttggtaatggatatgagcagagatgtatacatcctaccctgtagaccgcttggtttgtgattgacccggttccttcccatcttgatttactgttatttagtatctcatgccaggaaaccttaagtttgatgatagctcacaaataggatagcatatctatgagtaatttagtatagcatacttatgagtaatttagaatggaatattattctcaagcttccacatccacttttctttgctttttgtatccaatttgaaccacagtcttttattttatgacccccatcccatattcccaaaagctgcctgtgtgtaacctttaaggcttaaaggtagtctaaccatttaaaggtagtctaaggcttaaaggtagtctaactgtgtagtctaactgttctaacattgtttctagaaacattggttctagaataataactagcattatacctcacactcagccgtccacctctgagtttctattctggacaccccgcgcagaactgaataaacattaataacaccttgatcttatctcagctgctttgctatatgtaaataaggacagttttgcttttcctttaccaatccttattctttttctatttgtctcttgtcttattgcactgaccacacctttagtatagcgttcaaataaagctatcatagcaaacatccttttcttgctcctgatttgaaaggaaatgcatctaatgattaaccactaagaaagctgcatcttcttcacatcagcaacacaattgtaggcctttttttttaaaatagtgttttctatattaaatataatataatatattatatttaattatattaattaaatataattttagattatattaattaaatataattaattaaaataattttacatttgcagagtactttgacatatattacctcatttatttttgacaattcctcatcaatggagcctacactggagatataatatgctgtgctcttaaattgagcagaaattaagagaatttcagtgacaataagtttagaaatcaactctgttttcaaggatacaacaatctgactttgtagttgaaaagttttctgtggctctggtgaaaggagaaatgatttgaactgtcacattagagggaagactgttaaaaactcattgtcatgttttaatggccctgtcaattccagttttgcctcttaatatctttcttcagagtaggaggaaatcgaaatgattcaaagcttcttctgttgtcattaatttgtatgggggaagttgagctgaaagtattagtagaattcataggtttctgcagatgaagaggtttgcaaattaatagatttctgcaaatgaaagtttctgaaaatttggttcttccctctttctctccctgtctttcctattggttaggtcaataacatattttaaaagaatgtccatgagacagggaagaatatactaccaccccaaatatattttgcatttttattatttaacatgagatgtaaaaatctgctataagttgggagacaggttggtatagtttaaagcactgggcatcaggaaatctggttctggttttgattctttcactaagtagatctaagaatgagggaaatttgtaagggtgtggtgtcataagattgttccggttccaatgttctgtgattctcagtgttgttcaaattttttttcctgacatataacacataaatgcagaatttagcagttaaatcctgcgtcagttattagctctggctctcaatactaaagatgtaaaagggtcttctccttaaatctgaagattttacctggccttctgttacagtgttcggtttgttacatcaaatggagtgcattagtagtttagttttagatatacatctctttataagacctaagaccagttagtcatagtaatcaggtaaaatattattcagaacaatatgatttaaagtgatatttgatgtacaatttaatttgtgcatattgctttttctcattttttgtttggtgtaaatgctctctgaaaaaagaggatactgctattaacttaatgggagagattgaatatattatacagagattaatacctttgtttatctggattaataatttgatagcataatggtttataggaggacaaaaataaacttaacccttattttaccaaatatttttatcaaaaagattggatttattataaaaactagagcagttaaagtattgttttgatactaatgatgagttatctgctgcataattttggagaatgcaaataatcactgactcttaaaatgacatgtaatcatacattatttatattgctttctagacatagggggtatttgtgattatgaggatgaattatttttcacttagttgatattattttcaatacaattttctagccatttgactacttttaattcaactctttcttgatgtgtctgaatgagccctagttgaaatgtcagcatttactgaacaaattatagtcctctctcctctcctctccccaccctctcccctcctctcctctcctctcctttctctgtctctctctcttttctttttctctctctctctctcctctccccctctccccctctccccttcttcccctctctccctctccccctctcctctcctcttctctcctcttctcttcggggtcttgttctgttgcccaggctggggtgcagtggtgcaatcttggttcattgcaacttcagcatcccaggctcaagcaatcctcccacctcacccttccaagtagctgggattacaggcacgcaccaccactctgggctaattttggtctttttagtagagacagggtttcactatgtcaatcaggctgctcttgaatccctgaattcggacaattcgcctgcctcggtctctcagagtgttgggattacaggcgtgagccactgtgcccagctgctcagccccatattctttacatagcactgactaagcgctcctcctacttctgtggaactccttccactcatatctttggaatcggatggattccagagtaggagccatttgttgtgtgatgataggtgttcctggatcagatggatccaaaaggatttagtttggagcagtgcttttgaggaatcaggaagcacttggacaatcaagcagatttttctattctctgtgtatctcctatctctcccttgatttcctagtaagctgctttgaattatggcaaccttctaatgcagatccaaatatgggctgccaagaaatcctttgaacccctggggccacctgctttgccagcacattctaatgagcagtgaaataagtgattttaacagacacttagagacagcagcatattctccaagcaaattaacttccttacggaacagtgaattctttcaggtcttataagaaagacttggagaaccatcctactgtggatcaacataatcataacagtaatagtaaaaatttgtaaagccctgtggttttgaaagcattttttgcatgtcgttatttgatccccacagttactccattagaataaagaaggtaccaaatttgcatactgataaatattaatctcttagagtcagagtttgatttagtttttttcctttttaaatcttttcatattattcattttagatgaattgtccaattctgctttattgccaagaacaattatgtttatatctatttagaacactaaatatatgcacacacatataaataaatcttagcaacccaaagttgaaaaacttcacttatataggggtgtgtgtgtgtgtgtgtgtgtgtgtatgtatgtatgtatgtatgtatgtttggggttaatttcatacttaccctttactcacaagatttcaaaatcatttattgtatttgttagtatcattatagtcatacaaaagggttattttgggggtttttttggtcctctttaatatacgtattagtaggatagactttatgagtcacagctcaactgagaagatataatgtgattttaaaatatagatttttcttctgagactgtgaaaggtcagggtttgtgaagctagagtcctggaaagagaatgagtgatttataatactcttcagagtgcctaaagagatttttaaatttcttcatggtcttagtccctaagagctttccttgaaatagctttttagtttctgtgaagcctgtagtctttcaactgaaagcctgattgaagccatcacactcttactaggatacagaagagaaagggtgggattttgaggatgataaaaatggataaacttagaataaagggattggtgtgacgcctaagggtttgattatagtcactctttttaaaaaacactactctttcaggaggaaaaggaaagtaagattactatctaaaatacaaaagaaaaaaaaaactaacctgcaaagatgaaacacagggaaccttcaaataaaatgctctttatggtgcctcctgaattatgattttttttcatatttgagatctatttctatactatattcaaatggcttaaatatcctagacaaaaacttgtagttgttcttgaatggattattttatgttacagaattatgaggatttatctcctggttactaattgttatgcagttgacaatatttttataagtgaagcctcctcttcccgcacctttaaagcctcttctttaatcagaacccttcgtcctttctccctagaaataatgtgaatctgaattgccctactcctccttcccatctgtccaaatcttagttgtccatctcccttataaaggtagtcctacgcactatacccacagtgatttatagattaaaacaaatctggagatcaaatgtataacatgagcactatagttaataaaattgtattgttttagggatttttgttaaataagaagattttagatgctcttgttacacaaacaaaaaaaagtacgtgagatgatagatatgttactctgcttcactgtagtaaccattttactataaatatatatcacataacgttgtgttgtaaaccacaaatatacacaataaaatttatttttaaaatattttataaaatttagattatgtattatatatatcttttcaattatactttaagttctgggatatgtgtgcagagcatgcaggtttgtttcataggtatagatgtgccatggttgtttgtagcacccaatcaacgtgtcatctacattaggtatttctcctaatgctatccctcccctagccccccaccccccaacaggccccagtgtgtgatgttcccctccctgtgcccatatgttctcattgtgcaactcccacttatgaatgagaacatgtggtgtttggtttgcagagaatgatggtttccagcttcatccatgtccctgcaaaggacatgaactcattcttttttatggctgcatagtattccatggtgtatatgtgccacattttctttatccagtctatcattgatgggcatttgggttggtccaagtttttgctattgtgaatagtgctgcaataaacatatgtatgcatgtgtctttatagtagaatgatttataatcctttgggtacatatccagtaatggggtggctgggtcaaatggtatttctagttctagatccttgaggaatcttccacaatggttgaactaatttacactctcaccaacagtgtaaaagtgttcctgtttctccacatcctctccagcatctgttgtttcctgactttttaatgatcgccattctaactggtgtgagatggtatctcattgtggttttgatatgcatttctctagtgaccaattataatgagctttttttcatatgtttgttggccacatacatatcttcctttaagaagtgtctgttcatatcctttgcccactttttgatggggttgtttgtttttttcttgtaaatttgtttaattaagttcattgtagattctggatattagcccttggtcagatggatagattgcaaaaattttctcccattctgtaggttacctgttcactgatgataagtttcttttgctgtgcagaagctctttcatttaattagatcccattcatcaattttagcttttgttgctattgcttttggtgttttagttatgaagtatttgcccatgcctatgtcctgaatggtattgcctaggttttcttctaggatttttatggttttaggtcttatgtttaagtctttaatccatcttgagttaatttttgtataagatttaagtaaggggtctagtttcagttttctgcatatggctagccagttttcccaacaccatttattaaataggaatactttccccattgctagtttttgtcaggtttgtcaaatatcagatgtttgtagatgtgtggtgttatttctgaggcctctgttctgttccattggtctatatatctgttttgataccagtaccatgctgttttcgttactgtagccttgtattatagtttgaaatcaagtagcatgatgcctccagatttgttctatttgcttaggattgtcttggctatacaggctttcttggttccacatgagaaatttaaagtagttttttctaattctgtgaagagtgtcagtggtagcttgatggggatagcattgaatctaaagattgctttgggcagtatgaccatttttgcaatattaattctttctatccatgagcatggaatgtttttccatttgtttgtgtcctctcttatttccttgagcagtggtttgtagttctccttgaaaagggcctccacatcccttgtaaattgtattcctaggtattttattctctttgtagcaattgtgaatgggagtttactcatgatttggctgtttgtctattattggtgtataggaatgcttgtgatttttgcacattgattttgtatcctgagactttgctgaaggtgcttagcagcttaaggagactttgggctgagacagtggggttttctaaatatataatcatgtcatctgcaaacagagaaaatttgacttcctcttttcctatttgaataccctttatttctttctcttgcctgatttccctggccagaacttccaatattgtgttgaataggagtggtgagagagggcatccttgtcttgtgccggttttcaaagggagtgcttccagcttttgcccattcagtatgatattggctgtgggtctgtcataaatagctcttattattttgagatatgctccaccaatacctagtttattgagagtttttagcatgaaggagtgttgaattttatcgaagccctttccgcatctattgagataatcatgtggtttttgtcattggttctgtttatgtgttggattacattgattgatttgcatatgttgaacaagccttgcatcccagggaagaagccgagttgatcttggtggataagctttttcatttgctactgggttcagtttgccaatattttattgaggattttcgcattgatgttcatcgggggtattggcctgaaattttctttttttgttgtgtctctgccaggttttgggatcaggatggtgctggcctcataaaatgagttagggaggagtccctctttttctatttttgaaatagtttcagaaggaatggtactagctcctctttgtacctctggtagaattcaactgtgactccatctggtcctgggctttatttggttggtaggctattaattactgccttagtttcagaacttgttattggtctattcagggactcgacttcttcctggtttagtcttgggagggtgtatgtattcaggaattcatccatttcttctagattttctagtttatttgtgtaaaggtgtttatagtattctctgatagtttgtatttctgtggaatcagtggtgatatcccctttatcattttttattgtgtctatttgattcttctctcttttcttttttattaatctgggtaatgttctatctattttgtaaatcttttcaaaaaaccacctcctggattcattgagttttttttgaagggtttttcatgtctatctccttcagttctgctctgatattagttatttcttgtcttctgctagtttttgaatgtgtttgctcttgcttccctagttcttttaattgtgatgttagggtgtcaattattgatctttctcattttctgatgtgggggtttagtgctataaatttttctctaaacacgctttaactgtgtcccagagattctgatacattgtgtctttgttctcattggtttcaaagaacttatttatttccaccttaattttgttatttacccagtaaacattccacatgaagttattcagtttccatgtagttgtgcaattttgagtgagtttcttaatcctgagttctaatttgatgacagtgtcgtctgacagactgttatgatttccattcttttgcatttgctgaggagtgttttacttccaattttgtggtcaattttagaataagtgcgatgtggtgctcagaaaaatgtatattctgttgatttggggtggagaattctgtagatatctattaggtccgcttggtctagagctgagttcaagtcctgaatatccttgttaattttctgtcttgttgatctgtctgatattgacagtggggtgttaaagtctcccactattattgtatgggagtctaagtctctttgtaggtctctaagaacttgtgttatgaatctgggtgctcctatgttgggtgcatatatatttaggatagttagctcttcttgttgaattgatccctttaccattatgtaatgcccatctttgacttttttgatctttgttggtttaaagtctgttttatcagagactaggattgccacccctgcttttttttgctttccatttgcttggtaaatattcccccatctctttattttgagcctgtctgtgtctttgcacatgagatgggtcttctgaatatagtacactgataggtcttgactctttatccaatttgccagtctgtgtcttttaattcgggcatttagcctgtttacatttaaggttaatattgttacgtgtgaatttgatcctgtcgttatgatgctagctggttcttttgcccattagttaatgcagcattttcatagtgttgatggtctttacaatttggtatgtttttgcagtggctggtaccagtttttcctctccatatttagtgcttccttcaggagctcttttagggcaggtctggtggtgacaaaatccctcggcgatggcttgtctgtaaaggattttatttctcctttgcttataaatcttagtttggctggatatgaaattctggttgaaaattcttttctttaagaatgttgaatattggcccccactctcttctggcttgtagggtttcctcagagagatccgctgttagtctgatgtgcttccctttgtgggtaacccgacctttcactcatgatttggctctctgtttgtctgttattggtgtataagaatgcttgtgatttttgcacattgattttgtatcctgagactttgctgaaggtgcttattagcttaatgagattttgggctgagacaatgggtttttctagatatgcaatgatgtcatctgcaaacggacaatttgacttcctcttttcctaactgaataccctttatttccttctcctgcctgattgccctggccagaacttccaacactatgttgaataggagtggtgagagagggcatccctgtcttgtgccagttttcaaagggaatgcttccagtttttgcccattcagtatgatattggctgtgggtgtgtcatagatagctcttatcattttgagatacgtcccatcaatacctaatttattgagagtttttagcatgaagtgttgttgaattttgtcaaaggccttttctgcatctattgagataatcatgtggtttttatctttggttctgtttatatgctggattacatttattgatttacgtatattgaaccagccttgcatcccagggatggagcccacttgatcatggtggataagctttttgatgtgccacttgattcggtttgccagtattttattcaggatttttgcatcagtgttcaccaaggatattggtctaaaattctcttttttggttgtgtctctgcccggctttggtatcaggatgatgctggcctcataaaatgagttagggaggattccgtctttttctattgattggaatagtttcagaaggaacggtaccagttcctccttgtacctctggtagaattcagctgtgaatccatctggtcctggactctttttgattggtaagctattgattattgccacaatttcagagcctgttattggtctattcagagattcaacttcttcctggtttagtcttgggagggtgtacgtgtcgaggaatttatccatttcttctagattttctagtttatttgtgtagaggtatttgtagtattctctgatggtagtttgtatttctgtgggatcggtggtgatatcccctttatcattttttattgcgtctatttgattcttctctcttttcttctttattagtcttgctagcggtctatcaattttgttgatcctttcaaaaaaccagctcctggattcattaattttttgaagggttttttgtgtctctatttccttcagttgtgctctgattttagttatttcttgccttctgctagcttttgaatgtgtttgctcttgcttttctagttcttttaattgtgatgttagggtgtcaattttggatctttcctgctttctcttgtgggcatttagtgctataaatttccctctacacactgctttgaatgtgtcccggagattctggtatgttgtgtctttgttctcgttggtttcaaagaacatctttatttctgccttcatttcgttatgtacccagcagtcattcaggagcaggtttttcagtttccatgtagttgagtgattttgagtgagtttcttaatcctgagttctagtttgattgcactgtggtctgagagacagtttgttataatttctgttcttttacatttgctgaggagagctttacttccaactatgtggtcaattttggaataggtgtggtgtggtgctgaaaagaatgtatattctgttgatttggggtgaagagttctgttgatgtctattaggtctgcttggtgcagagctcagttcaattcccaggtatccttgttaactttctgtctcgttgatctgtctaatgttgacagtggggtgttaaagtctcccattattattgtgtgggagtctaagtctcttggtaggtcactcaggacttgctttatgaatctgggtgctcctgtattgggtgcatatatatttaggatagttagctcttcctgttgaattgatccctttaccattatgtaatggccttctttgtctcttttgatctttgttggtttaaagtctgttttatcagagactaggattgcaacccctgcctttttttgttttccatttgcttggtagatcttcctccatccttctgttttgagcctatgtgtgtctctgcaggtgagatgcgtttcttgaatacagcacactgataggtcttgactctttatccaatttgcaagtctgtgtcttttaattggagcatttattccatttacatttaaagttaatattgttatgtgtgaatttgatcctgtcattatgatgttaggtggttattttgctcgttagttgatgcagttttttcctagactcgatggtctttacaatttggcatggttttgcagtggctggtaccggttgttcctttccatgtttagcgcttccttcaggagctcttttaaggcaggcctggtggtgacaaaatctctcagcatttgtttgtctgtaaagtattttatttctccttcacgtatgaagcttagtttggctggatatgaaattctgggttaaaaattcttttctttaagaatgttgaatatcggcccccactctcttctagcttgtagactttctgccgagagatccactgttagtctgttgggcttccctttgtgggtatccctacctttctctctggctgcccttaacattttttccttcatttccactgtggtcattctgacaattatgtgtcttggagctccatccagttttgttcccttgctggcaaggagttgtgatcctttggaggagaagaggtgttctggtttttggaattttcagcctttttccgctggtttttcctcatcttcatggatttatctatctgtggtctttgatgttggtaacctttggatggcgtttttgcgtggatgtcctttttgttgatgttgatgctgttcctttctgtttgttagttttcctctaacaggcccctctgctacaggtctgctggagtttgctggaggtccattccagaccttgtttgcctgcgtatcaccagcataggcttcagaacagcaagattgcttcctgttccttcctctggaggctttgtcctagagaggcactcgccagatgccagccggagctctcctatatgagatgtctgtcgacccctgctgggaggtgtccccagtcaggaggcacaggggtctggaacccacttgaggtggcagtctgtcccttagcagaactcaagcacagtgatgagagatctgctgctctctttacagccggcaggcaggagtgtttaagtctgctgaaggtgtgcccacagcctccccttcccccaggtgctctgtcccagggagatgggagttttatctctaaggtcctgactggggctgctgcctttctttcagagaagccctgcctagagaggaggaatctagagaggctgtctggctacagtatcttttctgagctggggtgggctctgcccagttcgaacttcccagaggctttgtttacactgtgaggggaaaaccgcctactccagcctcagtaatggtggacgcccctcccccaaccaagctggagtaacccagggcaacttcagactgctatgctggcagtgagaatttcaagacagcagatcttagcttgctgggctccatgggggtgggatctgctgagctagaccacttggctccctggcttcagccccctttccaggggagtgtatggttctggcattccaggtgccactggggtattaaaaaaaactcctgcagctagcttggtgtctgctcaaatggccacccagttttgtgcttgaaacccagggccttggtggtgtaggcatccgagggaatgtcctggtctgtgggttgcaaagaccatgggaaaagtgtcatatctgggccagattgcattgttcctcatggcttcccttggctaggggagggagttccctgaccccttcacttcccttgtgaggtgacaccccaccctgcttcaggttgcccccgtacccactgtctaaccagtctcaatgagatgagctggtacctgtgttggaaacgcagaaatcacccgccttctgcgttgatctagctgggagctgcagactggagctgtttctatttgttcatcttgccagccctatgtatcatattttgaacaatatctgattactttcatttaaatgttttctgcattgtgttcagtgtttgagggaagaagctatctcatattttctttgtcctagagagccaagtgtagtactagtaacattgtgtcaatataattagctctgtgaatttgacttgatgaaaatgagtatgttagttcagatcctctgagaagcctgtcaccaagacaggattaagtgtgtaagaaatgtattatgggaaatggttgtaagagaaaatagggaaggagctgggagagtctcggagagccattggatcacaacccaagtctgactccaagggaagaagaaaggaaagttaggtgcaaatattgtagatgtagtttgtttctaaggaacatttgaaaagaccaatggtgagtcgtcagccaaagttactaattaggtcccatttcctcagaagctggcccaccttaatattcctgctgtgctcagtcacagctcctgggaacctcatgggaactatggccttggtacaaacgcaggaatgattttacagcatagcagtcagttgggccctcgttcaattacagcctcttctgttggagacctaatgtgtatttttatggccagaatacagatattttagatgaaaatttaatgcatataaaccctaaaagagcattctatttctatcacttacttcttctgtgaagtacttttattcataaaaacttttcaggctacattccttagggcaaggctatagcttttcttcattttgtatagttcatgagtggtgtcctgtattagaccctatttaaaaatcaaaagtccaagaatgtaaactaaacactctgagtaatttaccatattcagttagtagtttacttgtaatgaggacattacaatttttttaaaaaaaatatggtgttctagttgttttacatttctgtgtctttaaaaaaagtatgtgaattcacttttaaattgttgccaaagggctttttttctttgcaatgttacataaaaggaaacttacatataggaattttgccagctatgttagataagaaaattgctttgtgagtgtatatttgtgagtacatctagttttctacatttattgtctccagtgtttatttcacatcactgaatctatttttagagcttatgttgatactctcctttttccccagcatataggacaaatgtaataaccttttttaaactcattttttatgattagattcaacagagaaaatgatactgttaaatttatatatacatatatttccagatttctgtgtatttttaacaacctcaaactcataaaagctacaagttcagaattttgttttcctaaactgtttgagagtgatttgctaacataatgcctcatcacccctttaggatgtttttcttataaacaagggtattcttctacataatcataatgcaacatccaaatcagtactacctaatctatagacatcattcagtttttactaatcatccaaatgttcttgatagattagaaaaaggatccagttcagaatctcttatttcattaagttgtcatgtctgtaattcccttcaacctggaaccatttcttactctttcattcactttcttgaccttgatgctttcgaagattacaggccatttttttgaatatccctcaatttgggcatgtctaatgttttgtcatggttagattcaggttatacatctttggcaggaacaacacggaaagaataatctgttcttatttcttccactcaggtaatatgtatgcagtttcattttttcccattattggtgatgattagtgtgatcacattaataaggtgtgtctaccaggctactccacgatgaaattactcttttccccattgtaattaataggtattttgtgtagagatacttcataactatttaattgccccatttctcatcagactttcaatttattagtttatttatatgttatatcaatatggactcatgaattctcattttattcaatggattgtatttccttgctatcattatttgttttggtgttcaaattgtccccatattgtccagtgggaagacttcaagctggtttctgtgtccttttaatatattccatcatcctttgagccttgcctttctttatggttcagaaagatgttccaggcttatgtctctgtcccagctctagaattagatctttctccaaagagccttgtttcctttagtcaaaatattaagaaaccaagatctgcttggtaaatatgtttattgttatagagttgtcattgcttacaagtcatctcattgtatagaactaaggaatctatatgtatatacatatatgcatgtgtgtgtgcatacaaacatgtatttatgcccatttttttttattaatacataattcacataacattcacccctttaaagtgtacaattcaggctgggcatagtggcttacgcctgtaatcccagcactttgggaggccacggcgggtggatgacctgaggtcaggagttcgagaccagcctgttccaacatggtgaaactccgtctctactaaaaatacaaaaattatccaggcatagtggtgggtgcctgtaatcccagctatttggaaggctgaggcaggagaatcacttaaacctgggaggcagaggttgcagagagccgagatcatgccactgccctccagcctgggcaacagagtgagactccttctcaataaatagaatagaatagaataaatgtacaattcattgagttttagaatttacagagttgtgcaaccattactactgtttaatttcagaacatttccatcagtccaaaaagaaaccttatacccattagaaatcaatcaccctttattacccctgccctcagcccttggcaatcattaacctatattctgtttttatggatttgtctggtgatattattgtttgttgtggcagttgtttgattggttactgacttttgtgaactaattctgtagagtttgtattctttgtcatgtctgtccactgaaatctctgcttggtggtcagctaatgattgaatagacatgtccttaaatttctggaaccagtaagtctaccagtctttgccaaggagttctgtgtgtgtttgaacatgcgtttgtattactcaaccattcatttgaaaactctgtcttgctttcacctcctgcttgtatagaacttcaaagtcagccaaaggcaagagtgtagagccttctcaggactttcctaatgcacaaagccttgagcatgtacatagccctgcacatgagcattgctctctaagttctcagaaatatatctgagtctttcaaagcctttatggatgtctcattccccagcatttccttttaagctttttgattagtgtatttgccacaattttttattgtgtatagttagggttacatagtggtattttgatacatacaatgtaaaatactcagatcaaggtaattagcatttccatctgaaatatttatcatttctttgtgttgagaatattcaatatcttccttccagctatttgaaactattattgttagctatagtcatcctacagtgctatagaacactagaacttatttctcccatttagctgtaattttgtacactttaacaaatctttctctccacccccttctctctacccttccaagcttctagtatcctctattctacttctttcttctatgagatcaacttttttagcttctgcatatgaatgagaacatgcagtatttaactttctgttcctggcttattttatttaacataatgtcctcctttttcatgttgccataaatgacaggatttcattcttttttgtggcttaaagtattccatttggtatatataccacattttctttatccattcatctgttgttggacacttgggttgatttcttatcttggctattgtaaatgctgcagtgaataaaggagtgcagatatcccttcaacatcttgatttccttttctttggataaattcccagtagtgggattgctggatcatatggtagttctatttgtagtttttttaggaaactccatactgcttgtgtagtcgtttgccccaatttgtatctaccttctcagacagccacaaaattaaacagttgcctgtaactgcttttgacaaatgcccccaggaaaaaggcttttcatattgggtgagtcttgcaagtggagtgttccagggaaccaccattcaggtcaaataatgataattctctgggaataaggctttgcatttcactgtctctgatgtctgccagactgcttgtcattgcaaatgcaagctgttagttttcaaggttatcatggagctggagggtgggagatgggaccaaagcaagttaaaaacgccacaaagctccctgttcttaccaagattcagttatttttctggaataattaccctccaggcagctgcaggtatttggtcaatttctagagttctgaaaaagttgattctgattatttttgtgatatttcctgctattgtggaggagctaatttttggtgattcttgctctgcctttttgctgatgtcactgcccatatttttttctatatataaccatttgtgttgaaaactagggattcatagcagtatttccaattccaatccaacagcagaagattaatctagtgttctcccttcctatatttgtaactaacttctctgacagggagaaatgtagctcccattatccttaatatatttatctttttgagcagtatctctctatatatccaatctctcattactgctgccagttctcttgtgtgcaaataccctccttaccatagtaagctctaacaccctgtgccaggatgtcaccctaggtgaactcctccttatcttgtcatacattgattctccattcttggccacccacatccccacctgggtgggcttgtcattttttttagggtctgacactccacaccaggccacccctgtgtgaatgttctatcttgctctgcctaatggtttcaggaagggaacaggaagcttaattactttttaaagatgaattttattaccctttccgttcttcatgagttttacttatgagagtttgcaaagatatgttagacctaaatcagtatctctggcttcaagaatggaaggaaggtacacaaaactggtaaacaaattgatttttgttttaggcacctgtaaagaaaaactgattattttcaagaaggaagtgaatctaagaatccataagaattttagcaatgagtaagaccctatccaggcagctccatattcattcctgacgataaatcaaatgggttatttgaaagaaagacatagtaattttccttgacatcagccagtcattactgccatttagtcagcacatccctgtgtgctaggcattgtgtttaatccttaagtttgtatggtggtttctatttttacctgtgtgttaccgatgaagatacctgctttactttaccaaaaaaaaaaaaaaaaaatcctcaaaagattgatctatagttgctgttactgattcctctcttcttactttttattaaacccttttcatttaggatttcacctataccacttttctgaaaatggtgtggtcagaacacaaatgtattccatatcataactctaattattaaatctcagtcttcttcctccagacctgtcagcaccatcgtgcactgttgatcactcccttgttcttcaagcactttcttcacttggcttctactactttttttcttgcagtcacttttgctcatgctttctctttttctcaacttcttcatttcagtctttggacatctgttttctatctacatttattgcattggtagcctcattcagtctcatggctttaaataccatgcattcattgataatttccaaatttatatatctgaccccaaccaattccttgtacttcaaacttatatattcaattgcctatttgatttctcctctagagctctaacagatatctcaaatacagcctatgtaaaacagaatgtttgatctttctcacaaaagctgctcacccgtagtttttttttcccatctcagctaacagtaactccattctttcaattcttcagtctacaaacattgaatcatccttgctgctagtttcttcctcttacactacatgttgagtaggtaatacctgttgtctaccaccagaacagcaatcccaggatattaacccacaacacggtttgcaggtattagggttgccaagaaaaacatgactcacagaggcactggatggaacaacactgtactcacatacagaagagacagaacaacagtatcagtaataagtgtcagtggatcttgtctcacagccatggcagggaatgatctgtatacaccccttttgtgctgcaagtgaaggaccttgttcgctctccaccagggacagaaatagcagtggggtaagccaggcgccatatgacacacacttaagcagaacaaagaagtataaatcaaactcagaagagggaaagaaattcctaaacaaggtaataataagcccagcacagactgtgagggctcctgttcttcatgtaagaaactattccaggcccaaggcatattcttttgcaaccatggaatggtcaacaggttgcacacgattcccttgcccagcaccacacaaccagttttttaggaaatcttactgactccaccttcaaaacatagccagaatcttattatttcttgccacttcactgtaactaccctggtctaaactaacatatctcctacctggtcaccttgcttccagtgggtttctttttcatttagtattaaagcctacattcttacggtgatttaccaggctgtaaactccacatatgactattctctctatcatgcattctgtcccagccacactgccagccttgctcacacttcagagcccttgccctggctgttctctctgcctggaacacttatccaagaaatctacatggcttgttttttaacctctctgaatcccttgctcaagtgttactttcttaatatggcctgccttaaccactcttttaaattggaacctcttcttagctcagcattcctcagcccttttctctgctttgtcaccgttgcacttattgccttcaaagatactatatacattatttatttattatggccattgtctatcatcttccactagaaaataagctatatgagagcaattttttgtccattttattcattgcttaccctagtcttccacatgatagataataaatatgtgttgcctcagggaaagaaatgaaagtttagggaagttaagtgattctagtaaatggcagagctggaatttgagatgtttggcattcagaactactattagaaaacttttaagtaaattttttaacaaacagtgattttaaagtactatcaactagttactgttctgggctgtatattaaggggccaattttgtgatctaggctaatctaagaacctcataaccatattgattttataggaaaatacatgctgagtttgaaagaaaaactagtaaagaacttttagaaaatgatctgttcatcactgtggactacttgtactgaatactaaaggagtaagaaaacatgtagttgataatgattctaaacgcttgaggaaaaaagaacatgaggaatattgggtactgaaaaattttaataaaaatatttatttagagtcaattttttaaatgtaaaattgtagtctgggaatatacctacattaatattttactgacttaatttttccaatgcttgtgggccttcctaaaactaataattcattattataatcaatagcaatttcagttttattaattaaaaatattttgttatgatttttataggctaatgcagcaataaactcttttggtttagttttggatatggctgtgtgtgtgtgtctagtaagatataccattatgcatcctgtaacgacatttcagtcaacaatggactgcatttacaatggtggtcccataagattataatggagctgaaaaactcctatcacccagtgacatcatagcatcataacattatagcgcaacacattactcacctatttgtgttgatgctggtataaaacctactgtgctgccaggtgtataaaggtatatagcatatacaattatgtacagtaaataacacttgataaggatagtaaacaactatattactagtttatgtgtttactatactgtgctttttaattattattttaggatgtatttcttctacttataaaataaccataaaacagcctgaggtaggtcgttcaggaggtatccagaagaaggcttttcttttctttttttttttttttttttgagttggagtctggctctgtcgcccaggctgtagtgcaatgtcgcagtctctgctcactgcaacctccgcctcctgggttcatgcaattttcctgcctcaacctcccaagtagctgggattacagatgtgtaccaccacgcccaactaatttttgtatttgtagtagagacggggtttcaccatgttagtcaggctgatcttgaactcctgacctcaagtgatccatccgccttggcctcccaaaatgctgggattacaggcgtgagccaccgcgcctggcctggttgtttgtttgtttgtttgtttgtttttgaaacagagtcgcactctgtcgcccaggctggagtgcagtggcgcaatctcggctcactgcaaaactccacctcccaggctcaagtgattatcttgcctcagcctcccaccaccacacctggctaatttttgtatttttagtagagatggggtttcaccatgttggccaggctggtctcgaactcctgacctcaaatgatctgcctgccttggcctcccaaagtgctgggattacaggcattagccactgtgcccggccaagaaggcatttttaccactggagataacatctccatgcatatttttgtccctgaagaccttcagtgggacaagatgtgaaggtggaagatggtgatattgatgattccgaccctgtataggcctagcctaatgtgggtgtttgtgtcttcattttaaataaaacagcttaaaaagtaaaaacaaataaatgaaaaaattttaagtagaaaaatgttatagaacaaggatataaagaaagaaaatattaaaatatttctgtatagctgtacaatgtagttttaagcaaagtattattacaaaagttaacaggttttaaaaattaaaaataaagttacagtaagctaagattttgtcattgaagaaaaatattttaaaataaatttattgtagcctaagcgtacagtatttataaaggctgcattagtgtacagtaatgttccagaccttcacattcacccacctctcactcactgactcacccagagcaacttccagtcctgccagctgcattctcagtaagtgccctatacaggtgtgccatttttaatctttcataccacatttttactgtaccgtttctatgtttagacactcaaataattatcatactgttgtataaaactatagcacatacatggtttcttgtagcagcccagtaaagaattgcctactattcagtccataagactaaatagtatatactgtaacatgctgtacaagtttgtagctgagaagcaacgagctataccatatagcctacatgtgtaataagctgtatcacctgagtttatgtaagtactctctatgatgtttgcacaacaacaaaattgcctaatgacatgtttcttagaacgtattcctgtcgttaaggaaggggaatgcctgtgcatatatgtatatatactcacatacacacacgtggttgatcctcattatttacagattctgtatttgcaaattcacctacttgcttaaatttatttgtaaccacaaaatcaatattctcaatacttttatggttattcactgatatgtgaatatgcagtgtcaaaaaatttgagtcacctgatgcacacatttcaagttcaggtggaacaagttgatgctctgccttcttatttcatctctcatactgtaaacaagtattctcctgctatatacttattgtcatgtgttttgcatttttgtgcttcttgatgatttttctgtttgaaatgttccctaggtgcagtgctgaaatgctgtctagtgtttctagggactcagaggctgtgatgtgccttgcaaaaaaaatacacattacgtaagcttcattgaggcatgaattacagtaatgttggccatgagttcaatattaatgaaacaacaatatatattaaataaggtatctttaaacagaaatacacttaaaacaactttgtgtattgattagttgctgaaaatgttgtgaccaggggttctcaggagcctagccgtctattatcccctaggtgtagtaattcagtgtttgcttattcagtgttggggcacctttatagaacataagtattaagaatgatgacaattgactatatatatttgtacacagtttgcacaatttgtgtactttgtacaattatccccaagaagaatagttgtcatttgttaactacttcactatttgaatcttacattaacctccaatgaagccttgagatgtgtcttcaatatatttatattctggagaaatcacccaaattgaaatcttaacacaaaccattgaatggatgattactagtgagtaattttcaaaatattttaactaattttttaaattgtgtaatatacattcaaatgaataaaaataatgtattatttgaaaaagtaacagaagtaacatccttgaacctacaacttaggaaatattaccaatattttttaataccttccaggtgctcctcttagatctagtctttccctaccagagtaaaacactctagtgaattttgtgattatggttctttctctctctctctctttctttctttctttctgctttctttttttttttttttttttttgacagagttttcactcttgttgcccaggctggagtgcaatggtgtgatcttggctcaccgcaacctctgcctcccgggttcaagcgtttctcctgcctcagcctcccaagtagctgggattacaggcatgtgccaccacacctggctaattttgtatttttagtagagacagggtttctccatgttggtcaggctggtctcaacctcccgacctcaggtgatccgttcgcctcagcttcccaaagtgctgggattacaggcatgagccactgcccagccgacgatggttatttctctacattctttaaagtcatttttctgattggtttatgaatagtcatgaaatgcagattaaaaagaagaattggcattttatagttaggttttatagtcactcacctgaatgtcatgagatccagagaccaaatagtgacagtggctaagtgcctgggctctggagctggactgccagagtttgaattctagctctgctgcattctaactggaacaaattatttaacctaccttgaataaattatttaattttttagtgccttagtctgcctgcctgcctgcctgccttccttccttccttcttttcctttccttcttccttttcttttcctttcctttctttctttcttttcttttcctttcttgtctgcctcgcctcgccccgccccgccccgccccgcctcgccttgcctctttcctttcctttctttcctcttgctctgttgcccatgctggagtgcagtggcatgatctcagctcaccgtaacctctgcctcctggattcaagcaattctcctgccttagcctcccaagtagctgggattataggcgtgcaccactgtgcccagctaattttgtatttttagtagagacggagttttaccatgttggccatgtttggccaggctggtcttgaactcctgacctcaggtgatccgcctgccttggcctcccaaagtgctgggattactggcgtgagccactgtgcccagccttagcttctttatctataaaattgaggataataagagtacttactcccagaggggtgttacaattattaaataaattaatatatgtaaataaatggaacagtagagtagtagtaactaataaataaatgttagttatttaacaggtagagaaattaatgcaaagaattctttgaaagccacttgtattcttgcgtactatattaagtaatctttctttaaatgtttctgtaatttcttttaaacaactagtatcatgatttttgtcactctgtgacctctttttattcagctaattgtgggactactgaaaattaggctttccttggtatctctttgtgtctcccagcttatgtgagaacagatctcttcttagtttgcaaataaatttattccacatattttttacttggttgttcccctgacatactcatttaagggctactgctgccaaaaatgataatccaaaggctaatttatgtgttttagcctcatgttggtagaagttctttgtaggttatagatgaaacagtttgtctaataaatggcaaattgctattacgtaaatatcaagctcctgtttaagtaaaaaggaggtctgtgttagtgttgtctcttctcagcgttgctattcaatctgtactgaaaaaatcgtgacagttcaatatttacattagaaattggagaaacatgtgtcagagttaaaactgatgaactttgccactgtttatcaatagcaagtaaactggcaaatatgtcagtatgttagcagtaccaagaagctaaatgggaatattttagaagtttgacccattgttgcactctcacatggcagcctctttatcttgttagagaacatcctttgatttcccttttcattctttctgtgagtctgagctttcctttttacctataaatgtgcttatcttatcaaatagtactgcatgttgcccattcctgggacaaaagagaaataccatcctgtatttcttatagcaacccaggtaaggtttgtgtgtgagggagcattttggagaaaagagaattgtaaataaatgggtataatctagttggaaaactaaaaactttctttaataattttaaggtaggtcaagagcagtagtagtcattgtgtatttcaggttaaccaagaaactcctactgccctgtgaaaatttattttcaatgttagcattcctatcaatggataacagttacaaggcaaaaaaaaaaaaaaaaagtcaagtattttccatatttattttattaaggagaacttacattatgtataaatgttagcaccagaaatattaagcctatcaactctctgtgtttcctaagttttatcctgtggtcagcatgataattaatatgttacataatgaaattaaaagtcctcctttctaagcccagaagacagaaaatgaaaaggattaagcctcccttgatcagattgttatttttccttttgaggataggatatcctccatctctattgaaacccaaggcaaatcagaacataggtacccccatctccatggacacaaacacaaatatctaagaagcataattcaacagagagagaatctaagtgatataatgaaggtaataagggtatgggctttatgttggaacagacttgggttcaaatggtgattctaccatttattagctatatgaccttgcccaagttaggtaccttccctaaacctatttgcatctcataggacttgtgagattaaatgagaacatagaaaagaacttagcattccatctggcacataataaatatgtcaagttctttcatgcctttgtacatgcccttttttctgcagcatgcctgaataatttctatagtcttccttcaaaaacaggtggtcaagtttgcagcacttctggtcatgccatcttctatgaaattaagacaacatcaccttgtctgtgatgccttccttgcctttaactctatttcctgtgctatgacctggttatttactctttctctctgagcttccatgtatcttctatatatctctcactgtgcactatttcattgtacatgttgacctcctccacagggctaaatgctggggagcatggactatgtcttttcaactttgtatatgccttactaagcacagtgtttgatatacgataggtgctcagtaaatactcaattgctgagtgaaggtatattactcttgggagcacaggcagaaaagtagtctgtagtccagagcaggaggagggactgggtacaaccaaagatttttttccccaaaactgttattatgaaaattttcaaatatacaaaataattgaaagaattacaaggtaaacatccaaaaacctgccacctagattctagaattagcattttgtgagaatatactatattgccattaattgtaggcatcatgctgtacagtagacctgttagcttattccacctatctaactataattatgtatcctttgaccaacatctcagcactcccttcctcctgaccaccacagcctctggtgaccaccattctactttctaattcaatgaggtcaacttttttttagggtctgcatatgagtaagatcatgtggtatttgtttttctatgcctggcatacttcccttaatgtaatatcttttagtttcatccatgttgttgaaaatgacaggattgtcttttttatggctgagtagtattccattgtatatatatacaccacattttctttatccattgatctgctgttagactcttaggttgattctgtatcttggctattgggaatagtgttataataaacatgggagtgcagctctctctttagtatattgatttaatttcttttgtatatatacccagtagtgggattgttggatcatatggtagttcgaattttaattttttgaggaacattcatactgttttgaatatggttttactaatttacgttcccaccaacaacgtgcaagggtttctttttctccacattcttgccaacagttgttatcttttgtcttttgataatagctattctaacaggagttaggtgatatctcattgtggttttgatttgcatttccaggacaattagtgacacattttttcatattcctgttggccatttgtacgtcttcttttaaggcatgtctattcacatcttttgctcattttaaattgggttgtttgttttcttgctattgatttgagttcctcatataattttcattgttaacccctcatcagatgttttattagttcgttttcacactgctataaagaactgcctgagactgggtaatttataaaggaaagaggtttaattgactcacagttcagcatggtggggaggtgtcaggaaatttacagtcatggtggaaggcaaaggggaagcaaggcaccttcttcacagggcggcaagaaggagaatgaatgcaggaggaactaccaaacacttataaaactatcagttctcatgagaactcactcactatcatgagaaaagcatgggggaaaccgcttccctgattcagttaccttcacctggtctctcccttggcacgtggggattttggggattgcaattcaagatgagattttaggtggggacacagccaaatcatattagatgtatagtttgcaaataatttatcccattttgtaggttgtctcttcactctgttggttgttttctttgctatgcagaagctttttagtttgatgcaatcacatttgtctatttttacttttgttgtctgtgcctttgaagtcatatccaaaaaatcattgcccagaccaatgtccttgagcgttttctctttattttcttctggtagtttcatagtttcaagtcttaacatctttaatccatttagagtttatttttgcaaatggtgagagataagggtctagctttattattctgcatgtggatatgcagtcttctcagaaccatgtattgaagagactgttctttccacattgtatgttcttagtacctttgttgaaaatcagttggctgtaaatgtgtgaatttatttccaggccctctattctgtttcttgggtctagctttctgtttttatgccaatcccatgctgtttgggttactatagctttgtagtgtattttgaagccaagtcatgtgatgcttccagctttgttctttttgctgaagattgttttggctattcaaggtcttttgtggttcaatataaatcttaaagatttatttttctatttttgtaaataatgtcattggtatttttatggggattccattgaatacatgggtcactttggactatatgggcattttaacaatattaattttttcagtccatgaacatgggatatctttccatttatttgtgtcttcaatttatttcatcaatatattacagtttttaatatacagatctttcacttccttggttaaatttattcctaaatgtttttatagctactttattttttattttttatttttaaattttgtgggtacatagtgggtgtatatatttatgggatacatgagatgttttgatgtgggcatgcaatatgaaataatcacatcatggagaatggggtattcatgctcagaagcatttatactttgtgttgtaaacaatccaattacacccttttagttattttaaaatgtacagttaagttattattaactatagtcaccctgttatgctatcaaatagtaggtcttactcattctttcttctttttttccgattaatcatccccaccttttctctgcattctcccaacaactacccttttcagcctctggtaaccatccttctattctgtatgtccatgaattcagttgttttgatttttagatatcacaaataagtgagaaaatgtgatgtttgtctttctgtgcctggcttatttcacttaacataatgatctccagttccatccatgttgttgcaattgataggatattttttaaggctgaatagtactccattgtttatgtgtaccacatattctttttccattcatctgttgatggactctgtgttgcttccaagtcttggctaatatgaacagtgctataacaaacatggtagtgcagatatctcttcaatatactcatttcctttcttttggttatacctagcaatgggattgctggatcatatggtagttccatttttagtgttttgaggagcctccaaacagttctccatagtggttgtactaatttacgttcccaccaacagtgtataaaggtacccttttctccacattcttgccagcatttgttattgcctgtctttcagatataaacctgtagatgttttaaatggaattgttttcatgattcttttttcaaatagttcaccgttagtgcatagaaatgctactaacacacttttataagttgattttgtattctgcaactttactaaattcatttattagttctaagatttttggtacagtctttagggttttccatatataaaatgatgtcaactgcagacagggacaattcggtttcttcctttccaatttggatgccttttatttctttcttttgccaaatttctctggctaagacttccagtactgtgttgaatagaagtgagaatggacatccatatcttgttccagttcagcttttcctcattcagcatgatgttagctatgggtttgtcatatatggccattactgttttgaggtacatttcttttacatctaatttgagagttttaaatcatgaagtgatgtggaattttgtcaaatgattttaatgcatttattgaaatgactttgacttttatcatttcttcttctaatgtgatgtatcacatttattgatttacatatagtgaatcatccttgcatccctgggattaattacttgattgtggttgatgatcttttcgatgtggtgttctatttggcttattagtattttgttgaggatatttgcatgtatgttcatcatagatgttggcctgtagttttctttttttgttgtacctttgtctggttttggtatcagagtaatgctggtctagcagaatgagtttggaagtaattcttcctcttcaattatttggaagagtttgagaagaattggtgttagtgttttaaatatttggtagaattcagctatatttttaaatatttggtagttttttaactatctggctttttgttgataggagactttttattactgattcagtcgtctccttactcatctacatgaagaaatagatgagtaaggagactgaatcagtaatatttcatccttgatcagttgcatatgtacacagatttatccattctaagttatctaattcgttggcatataattgttcataataatttcttatgatcctttaatttctgtagtatcagttgtaatgtctccttttttatctctgattttgagtcttctctcactttttcttagtctaggtgtttattttatgttttcaaatgaacaactcatttcattgattttttttttcctttctttttttttttttttttgatatggagtctccctttgtcacccaggctggagtgcagtggctcaatctctgctcactgcaacctctgcctcccgggttcaagcgattctcctgcctcagcctcctgagtagctgggattacaggtttttgtttgttttgttttgtttttactttccattccatttatttttggtctgatctttattttctttcttctgctaattttgggctgagtttgtctttgtttttctaattctttgagatccaagattaggttttttatttgcaacctgtcttctttgtaggcatttattgctgtaattttccctctcaaactgcttttgctgcatcccataggttttggtatgttgtattttcattttcatttttctcaaaaaaattttaaattttatttataattttttcattgacttattgattgttcaggagcatgctgtttaatttccatgtacatgtgaatttttaaacgttcctcctgttactgatttctagttttatactacggttggagatttacagttttaaggaatcctgcacttagacatctttcatgggaaaggggaagccttgagaatatacttatcattcatgtaacatgctttgtcatgaacaaatctcagagttcctagttcatggaaaaggaacatacaggctactgtattcaggaatattccaaatagggataggattcgaacttttccataatttctttccttttttctttctgtattctctctttatcctacttccaacccctaatacatacacacataagagtgtatgagggttccctttcctccacatccatgagctcacatacacccatagctctagataaaagtacaaattaagcaatcaaatataactatataaattaaataaaattaaataagtaaaaggatactaattgatctttcaagattaggcagaggtctggaaactgatgataatgaagaaaaggtcatttcacattcattagataacgattcccatgatctaatttttctctcatttgaacagagagtgataatatcattagcagaaaaagttaaaggagaacaatggaccataatatgatttttttttagactgagtgattgcctttctatttactaaaagatctgaaagagtttacaaaattaaaacacatgtaaaaatagataaacgcagtgaccaagatgctatcaggtacctgagatgagctattttctacagttgagtaacgaatttgattattaatttctgctaatgaaagcaaaaagaaaatgctaaattacatatttctcttcttaatgcattctttttaaaaaataaggtcacaattttttttatttttcaggcatagaattggaaaaacataaccagagatacatggttatactaggtatgggaatttggagtaatattgtagacagtgacttcattgtgcttttataaaagatgcatatgtggtacctaaatcaaaattcttatatggactggggttctagagttgagcatgctgaagtctgaaaggctgaatatgtaatgtcaaatgctaactcaataaagatagttctgtggaatatggtactttgctacctcattatttagcttcacacagagataatatttaaagaatgtagaagtatttgtcatcaataaatcccatagtatgtcttcctcaaggaaaatgagcaaaggatgacttttactgcatataaattatacctccataaacatgatttgtaataaaataaattgtttttgagtgttcagagtttttttttttcttttttttttctttttttaaaattattattatactttaagttttagggtacatgtgcacaatgtacaggttagttacatatgtatacatgtgccatgctggtgtgctgcacccattaactcgtcatttagcattaggtgtatctcctaatgctatccttcccccctccccccaccccacaacagtccccagagtgtgatgttccccttcctgtgtccatgtgttctcattgttcaattcccatctatgagtggaacatgtggtgtttggttttttgtccttgcgatagtttactgagaatgatgatttccaatttcatccatgtccctacaaagggcatgaactcatcattttttatggctgcatagtattccatggtgtatatgtgccacattttcttaatccagtctatcattattggacatttgggttggttccaagtctttgctattgtgaatagtgccgcaataaacatacgtgtgcacgtgtctttatagcagcatgatttatagtcatttgggtatatacccagtaatgggatggctgggtcaaatggtatttctagttctagatccctgaggaatcgccacactgacttccacaatggttgaactagtttacagtcccaccaacagtgtaaaagtgttcctatttctccacatcctctccagcacctgttgtttcctaactttttaatgatcgccattctaactggtttgagatggtatctcattgtggttttgatttgcatttctctgatggccagtgatgatgagcatgttttcatgtgtctgttggctgcataaatgtcttcttttgagaagtgtctgttcatgtccttcacccactttttgatggggttgtttgttttttacttgtaaatttgtttgagttcattgtagattctggatattagccctttgtcagatgagtaggttgcaaaaattttctcccattttgtaggttgcctgttcactctgatggtagtttcttttgctgtgcagaagctctttagtttaattagatcccatttgtcaattttggcttttgttgccattgcttttggtgttttagacatgaagtctttgcccatgcctatgacctgaatggtaatgcctaggttttcttctagggtttttatggttttaggtctaacatttaagtctttaatccatcttgaattaatttttgtataaggtgtaaggaagggatccagtttcagctttctgcatatggctagccagttttcccagcaccatttattaaatagggaatcctttccccattgcttgtttttctcagatttgtcaaagatcagatagttgtagatatgtggcgttatttctgagggctctgttctgttccattgatctatatctctgttttggtaccagtaccatgctgttttggttactgtagccttgtagtatagtttgaagtcaggtagcgtgatgcctccagctttgttcttttggcttaggattgacttggcgatgcgggctcttttttggttccatatgaactttaaagtagttttttccaattctgtgaagaaagtcattggtagcttgatggggatggcattgaatctataaattaccttgggtttttaatagctgaaagactgcattgccattacctggttcttagatgtcatggaatctatgtgattcaggccacgtgctgaattataacccaaacatagtggtacttaaaagcccctgtagctctcatgcttctcctaatagaagcttttggctgaaacaagaaacgtttttgaaagaagcatattgtcattatccttttgtgaaattttaatagccagatttgtattcttattcatatgtaacaaaaaccttgctagcacagtggtgataacagaggtacctgcaagtaaaactgagggttttttttttgaagtaaaagaaagaaaaagcagctttgaagcaggtacttacacaaatactaccttgatttaccacatatctgtaatggatggcctgggagtagtgactgcagcctgaaaagtaatttagggcatggggtattaactgatgaccttatccataaaatattttagttatcctgtggaagttctgattttagttgacaaaacagaagcttctatagacctgtatattgttgagactacatatattattctaagaaggcttttgaatagatttgctgagtgtagttgatgaagatggcccttttaaatattagggaattcatactagatttactgtttcagttttttcattacagattttgagaggcttctcctggtagtaaaatgtcagatgaaactgttactgtagaattcactaggttactgattcagtttgtgagtattagaaaatgttcttccatagagattttaaatagtttttgtgacaaagcaaaaacaaagcaaactgaagttttccctggattgaagcagccgatcaaatattttaacgtttggagtttcaacttctaagtgaaaagattcctgattttaaaatataaaaggattatttgagaagcacgtactttgtgtatgaatgaagaaatgtatctattttccaatgaaagtttatattttggtgactgcttctactgaagtgatagcatggtcagtagtattccaacatctttggatactgttagcttcagccatcatatggtttgattaattgaactggtgtaatagattaatagatatggtggtatctatactaatctgattttcttttttatgttacataaaatagaatttttccttccttccttcctctttcctctcataatttgaacagatactggattcaaaaaatttatgatagcttaaaccccagggatatcattttctaaaggagtcatctgtagatggtttatgttaaagttggacaaatggatagaacatcaagattttaatatttgtttccacatttgtcccacttacggcataagtatcagggaagtggccagatggggtggctcatgcgtgtaatccaagcactctggatggctgaggcagaaggaacacttgaattcaggaatttgagaccagtctaggcaacatagtgagaccccatctctaccaaaaaaaaaaaaattatccgtgcatggtggcatgtgcctgtagccccagctatttgggaggctaaggtgggagaatcttttgagcctgggaggtggaggcttcagtgagccgacagagggagacctgtctcaaaacaaacaaacaagaatcagggaagatacatattcatttgcttttagaacttataataaaccattgataacaactcaaggattaattaggcctaacatttgagtgtatgtatagcataacacctctgttacaaattactggaggcatttgtgaattatctagttaatttcatctgaagaaagagacctaaaaaggaagctggggtagacctgcttttgccatgtaccccacttcatttcttatggctaaggttgttccacagtggtcctagtttcgaacctttgccttggtagcataaccccaaatttttctgaggctatagccttggagttggaattgcctagatcttcacagaaactattgtgctgaactctattgggttgacagagagctgggtatataccaccccactcacctatcatatttggggatgatgacagttggcaaggattggcaccattatcagtatctttaaaaggtatcaagaaattactggcaagtttatagctttaaatgcctatattagaaaagaagatagatctaagtttctatcttaacaagctagaaaatgaagagcaaattaaaacctagataaatagatggaaataaataataaagaacagaaataaatgaaatagaaaatgtatttaaaaaagaaaaagataaaaccaaaagccagatctttgaaaagattaataaaattaataaatccttaccaagactaatcaaggaaaagagaaaatataagtttaaacttttatgtatgaaagaggataaatcatatacagatattaaaaagtcaattagggactattatgaacgaatttatgtcagtaaccttaacaatttacatacaaaagagcattttttgaaaaacacaaattatttaaattgaaacaaaaagaaaatgaaaatacggatagctctatttccactaaagaaatttaattcataataaaaacctttccaaggagaatactctaggcccagatggttaaagaagaattaataccagtcttacgcaaaactctttcagaagcagagtgacagagaacactgacacacttgttttataaggccagcataaccctataccaaaatgtgtcaggcattaccaaagaagttacagaccagtattcctcataaaatattctcaaaaaacccccacaaaacaaaacaaaaaaaaaagagtaacaaacttaatacggtaatataaaggataataactcttgacccatatatacaaggttggtccagcatttgaaaatcgatatattttaaccacattaaccgaataaagagaaagtaatatgatcattatgttactggtgggtatttgttcttagagttcccaagatggtggcgggctgcttccaagatggtggcaagcctcttgttctctgacctggggttcttggcctcacggcttccaagaaatggaattttgggccatgtggtgattgttatagctctattcagctccattagaatgaaccccaggcacttagcctgcacaggaacaatggcgagcctctagcccaattgggagcggcagtgggcgccacctcactggatcaggagcacagcagacacctgccctatccggagggatggaagtcagcagtgggtgtgcgacagtggcaaacagcagtggtggatggcaagcgaaagctcagcttgagccctaacaaacacagaccagaagagtgtgcagttgcaagatttaagagagtgaaaacagagctcccatgaagtgggaggggacccaaaggggctttccattgcctgctcaaatgcctgggtttatatcccgatcattgtccctcctcctgttctctcaggcgatagatgattggctatttctttacctcctgtttttgcctaattagcattttagtgagctctctttactacctgattggtcgggtgtgcgggtgtgagctaagctgcaagccccgtgtttaaaggtggatgcagtcaccttcccagctaggcttagggattcttagtcagcctaggaaatccagctagcactgtctctcaattgcaatagacgcatgaaaggcattttataaattcagtacccatagaagataaaacatgctcagcaacgtaagaatagagagaaacttctaaacctaatgaaggatatctatggaaaatctgtagctaacattatacttcatggtgaaagacaatgtttgacttctaagatctggaagaagacaaagatgtccttcctctttgagcacttatattcaccattgtattggaatacagtgtaatatagtactggagtcagtgcagtagggcaagaaaagaaggcatatggccaaaggaagtaaaactaacattcacaaacaacatggttatgcatgtagaaaatcctaagaaataataaatggagagagatatatcaggttcatgactgttagactctatattgtgaagataccattctccaaatttacttatagattcaacacaatcccagtcaaaatcacggtaggcatttctgggaagacagtaaattaattcctaaatttatatggaaatgcaaggaatctagaataaactcttttgcaaaagatctaagttgtagaacatagacttaccaggtttttaaaacttcttatttcaaagtggattacagacctaaatgtaaatgccaaaacaaaaaaacttctaaagaaaacatgggaaaaaatattcatgacacaaaaacagggcatgtacaaacacaaatatgaaccataaaagacaaaaactattaaactgaactttttcaaaattgaaacttgctctttgaaaaacagcattaagaaaatgaaaatgcaagccatagactgggaaaacatatttgtaatatgcatgtctgacagtggacttggcaatggtcccattgtttgtgtcccctcaaaattcatatgttgaaatgctaaccaccaaggtgatactattaagagatggagcctttggtaggtgattgcatcatgagggcggagccctcatgaattggattagtgctttaataaaagaggccggaaggatcttgtttgccccttccactatgtgaggagacaatgaaaaggcacaatttctgtgaaccaggaaaccgaccctcatcagactgaattggttggtgccttgatcttggattttgtagcctccaaaactgtgagaactaaacttcttttgtttataagctaattagtctgtggtattctggttatagcatccagaatggactcagacagagttgtatacagagcatatacagaatgaagaactcgtaggaaccaacaataatgagatgaacaactcaattaaacaattgggcaggctgtaatcccagcactttggaaggctgaggtgggcggatcacttgagcctaggagctccagacctgggcaacatggcaaaaccccatccctactaaaaatagaaaaaaacttagctgggtgtggtggggcagcctgtagtcccagctactcaggaggctgaggtgggtcgatcgcttcagcctgggaggcagaggctgtagtgatcatgccaccgcacaccagcctgggtgtcagagccagaccctgcctccaaaaaaaacaaaaaacaaaaatcagcaacacataattgggcaggaacttgaacaatcacaaaagaatatgtatcaattgtctaaaagtacatgaaaacattttctataccattagccaccagggaaatgaaagtcaaaactacaggaattaattaaaaggaaaaagactgacagtatcaagtattgacaaggaagtgaagcaaggggtgctctcatatgttgctgctaggggtgtaataattgtataaccactttgggaaacaatttggcaatttcttataaagataaacttacatttaacatttgaagtttgaacctccattcctaggtatttattcaaggaaaatgaaaatctgtatccacaaacgctgtgtatatatttacagctctattcatactagctgaaagctggaaacagaggaatgaataaacagatcatggtatattcatacagtatatattcatgctactcagcaatgaaaaggaatgaactaccgatgcacacaacaacatgaaagaatctcaggaacgttatgctgagtaaaagaagctagacacaaaagactacgtattatatgagtacattattgtatgattccatctatatgaaatttttttaaatgaaaaactaatatattgtgataaaattcagatctgtggttgcctggagtggaggtgtttgaccaaagagaggcatgggggaacattctggagtgatggaaatatttataatggcagggctacataaatgccccagctcaaggaactgtacaattaaaatgtatgcctttcactgagtataaaccatacatcaataaagtttatgtttttgagtaaaagggagttccagactctgtgctctgacaactttggcacatggggaatactacacttactctccataggttaagccttcctagttatctttgataagccttgtcctagacagagacaatttttatactgacaaaatcaaaatacattctattaaattaaatggaaatctcctcactaaaatgaagtacaacacatagatggaatacatgggatgagatacatatcctggatttcagtagtattctttgagagtcttttaaaaatatatttggcaggccgggcatggtggattatgtctgtaatcctagcactttgggaggctgaggtgagaggaacacctgaggtcagcagttcaagaccagcctggccaacatggtgaaaccctgtctctactaaaactatgaaaattagctgggtgtggtggtgggcccttgtaattgcagctactcagggggctgaggcaggaaaatagcttgaacctgggaggtggaggttgcagtgagctgagatcgtgccattgcactccagcctgggagacaaagcaaaactctctctctctctctctctctctctatacatacatatatatatatacacacacacacacacacacacatacatcacaacaactaaatttttaaaaaaattctaattcagggttcagtgactggaccatgaagcctatttttgtactgccccaatgtaagaatggttttacattttaaaaagttgtttaaaaaaaaaaaaaaagtcctgtcccttaagaaaaaacaagcaaccagtactataagtgttcctcaaagtctacaatatttactatccaaacttttacagaaaaagctttctaactcctattctttaccctttgatctgcacactctacctactgtaactgattcagcctcaaaaactaacatgttgtctttttgtttgcattagagaatcctagatgtttgaagtactaattagtatacactaagcctatggccttatttcctttgctctgaaaactaagagggaatgttaagttgaatgatatgatagctactttccaaggaatgctgtatttcttacgaattggcctctttggctgtactccagatggcctggttagaatgacgttaaagctgtggaatagccaaagcacttgaaatatcagttatgtatgtagcatgaggctgtcagccattttgcaaaaagcatgggacaatgctaaatatttctggtttgccccagtggtatagattggagaaccatttttactcttcagccttcatggaaaatggcagggtagtttaaaaggtctttgagaagttttggaggttctaaaggggttttttttttttttttttttggcatggggttgtcagaatagcggatttgcacttctgtctcagcaatatcaagatttcccccttttagtgcatttgaacccacacttcaaccttagaatcttcttactctctcccaccctttgcctctgcctcctgtggcctcatacagctgatctcaaaccataatagatcttttaatattaacttaggtcctctgagcatctctttatttcaaaattttaaagatgaacctgggataaagggacatagagctgctttaggaaatacacagcctctttggggatctcactgtgctagtggtatacagattcaagttgaaagaccagtggaattgtggttgacagcccagggacaggaacaagcaggagcctggtatgagctaacatttaagttaaaatctgtgactatttacgatatttctttcttttcatcttttctctaggcctactctgtgtatgatgaagacattgggtactgtcaagggcagtcttttcttgctgctgtattactgctgcatgtaagtaatggtccgtgtgataaatagcacagtgctgccaagtttattttactttctactggctttgttcttccttcttatttcccatttatctgatggagattacatatggcatatcttttttaaaatgtacgttaggtgataaagtaagagatatgatgtcaaaaatacgacagtttctcaatggaattagttttgttggctagaaaaggataaattgcttatttggagttatttttaactagaatcctctggaattaaagaagtcggtataactgcccaaatatcaggacctggaccattaagacccactatactgtgacaaggaagtcctttatcatttctgtgatgtatttttatatatcctctttcctgtcagttaccttcatttgacagatcatttattgagcatcaattttcaggtactgggctaggaagtggggttataaagatgaatcatttataatttgtgttctcaaagacttcatagtccaggatggggcacagataatgtaggcatgaacttataatttttgttctcttttatgtgtctttatttttctgatgacaaaaataatacatactcattaaataacttacagtatgctaagtgaaagtgatacacaggttaagagaatagagaggagaattacccaaccaagctctgccagaactttcagaaaagactttctggaggaggtggcagctttgtcaagacagaaatgagattggagaaggtgagaggggaaagggagggggtaaagaattattgacaaaagtcacaatatgagaaaatgtatggaagtatgatagggcacagcatacaaagggaacaatatgaaatcacagtttactatagcaattgtacacggggagtggtatgacgtaaaaatggtaagatgggaaattgtgaagactttgtaatgtgtcaaaaatgcaggctttattctagagctaatgaggaaccattgatcactttggagcaagggaataatacagtcatatgatcattttagataaatcttttcatacctgtgtaaagggcagaattaaaggaaacagacagcagcagagagaccaggtagaaaacatcaatatggccaggcacagtggctcacacctgtaatcccaacactttgggaggttgaggcaggaggatcacttgagcccaggaatttgaaaccagcctaggcaatataatgagacaccatcactaccacacacacaaaaggtatctgggtgtgttggtgagcacctgtagtggtggtgagctacctgggaggctgaagtgggaggaccacttgagcctgggaggtcaaggctgcagtaagccttgattgcaccactgcagtccagcttgggcaatagaaggagaccctgtctcaaaaaaataataataataaaaaggaaaagaaaatgtcagtttaaatgagagatgttgagaacccagagaaaagcagaattaagaaacattcagggagcaaaattgttaggttttgtggatggattggcaaaggagcagtcaaaggtgacatatctagtttcctggctttggagactggatgaatgttgtattttgagttcagatagcaaatatatctatggagattgaatgaaggaaaaagtttaggagttgatgatgatgagttctttctttctctctttctttctttagagacagagtctcactctgtcgcccaggctggaatgcagtggcacaatctcggctcactgcaagctccgcctcccctgttcactccattctcctgcctcagccttcccagtagctgggactacaggctcctgccaccatgcccggctaactttttgtatattttagtagagatggggtttcaccatgttagccaggatggtcttgatcttctgacctcgtgatccacctgcctcagcctcccaaagtgctgggattacaggcgtgagccaccgcgccggcctttatttatttatttatttatttatttatttagatgaagtctacctctgtctttcaggctggagtgcagtggcatgatctcagctctctgcaacctccacctcctgggttcaagtgattctcctgcctcagcctcccaagtagctgagattacaggcatgcgccaccacaccgggctaatttttgtattttagtagatggggtttcaccatgttagccaggctggtctcaaactcctgacctcaagtgtgccgtctgccttggcctcctaaagtgctgggattgtaggcaggagccgctgtgcccgtctgatgataagttttgtttctaattatttgagttcaggatattcttgggacatctaggtggagatatatgttcagcagccagttgcatactggagattaatgctggaggagaaatgaaagctgaagtcatgagagtacatcagatcatctagaagaatgaatagagtaagaagattaaatcccaggaacagcaaacatttgaagggctgatgcggaagtaaaatccttaaagaagttcggattctcagtagggaggaagcaatgaatagtgtcaaatgtaacgagaggccaaacaagtttaaaaggacagcattgtttttttgaggtttagcattctggaagtgaagagcaattatagtagattcatggtcctaattctgaaaacctgattttaattataatagttctattatgattttcactttgtttcactttgaggttgatggtttttttccctctgttacattattatctgtttatgacagtttctgtcttcttgttatccttctttctttgatttctctacatctcacctttttgggacttcctgtgatgaccagttactttatagtcacaaattctcaggggcccttgttccccttctaaacccactagaatctagaatagtcaggtcccttccctaagaggctggagaccatacccagtgacatggatgttttcttcaaggctcagagccatctttcttctaaaggaagcctttataattacttggatgagaagctgaagttcaagacatgggtggtgaagctttggtttgaacaaagcaatctttttttttttttttttttttttttttgagatggagtctcgctcagttgccaggctggagtgcagtggtgcaatctcagctcaatgaaacctccgcctcctgggttcaagcgattctcctgccccagcctccagagtagtgggactacaggcacacgtatcaccatgcccagctaattttagtttttttttcagtagagacagagtttcaccatgttagccaggctggtcttgatctcctgacctggtgatcctcccaccttagcctcccaaagtgctgggattacaggcgtgagccaccacgcctggccacaaagtgatctttgaacataccgtagtttagcattttttacctgtagccctgtttaacatattataatatatttattaatgttcagtgagaagaatatctctctgagaaatctgttttggatttgacagaagtttgggtcaattataagttcataattatttggaaacaccctccccaccccgtccgcaaagagagaaagagagagattcaaataacgagagctcaaatacccagaattttttttctacattaggtactctactattataagggccacgtagtgagtcagcctttgtgaactccaacaagatagcttccagtgtatgttacaagagagacagaaattcagtctagtctctcacactttctacattaatagaattattcagtgttgtcatggcttttataaaaataacttgaaatatagaaatccttttagaatccttaaggaacaatgaactgatattcagcattctgttaatgaaaaacatattctaatttttaattggcagtatgtttgataattctgttaattagcatattccattaactgaccaacccatccattcaaccaatttgaataacagaagttaactgtaatttattttttactatatttttgtctccctggtttaaacaaatagaagaatacggactggtttaaacaattcatcaaacacactatctcaggttccagggagatacattattagggtcttactgactaatttgttatcagttacataagctattgcttctttttgctgccagacatctttggaagctccatattaatcactgtgagagcctgcttccttttgggttctgtcctttcctcacccatagtcatttatatttcacattcattgcctgagaagaaagtaagaccaaaaatgaaagtatgttcaaaaacagttttgaatttttaggattttttcgtgtctaagtagtctaaataaataattagcctctccttgtacttggaaatttctagatgctttgacaatagctttgtaacatgtagtagtttagacaatggaagaattaaatgtttatcacagtagactcttacatccatttatgaaattacaagaaatttgtcatttacagttggagaatgttatagtacagattgcctgcaaccattataatgttcaactgcctttgtaatgaaatatacaataataatttctaatttcataatcatgatattagtctttatctcttagtcttaataaattatgacctgattatatttcacttactctaaaaattatataaaatattttagataatttgtaacccaataatttttctacaatatttattgttacaagttttaaattttttaattgaacatgtacctttttagacattcagaagtttatgttcatttttaaggttaaattactgtatgtatactaatattggcatttatagaagctttccaactgcaagaaggattatgtttgaataatctagcatgtttaaaactattgaatttttttaaaaaaactatgactaggtacaattcctttcgaaaccaatttggctttgtctgataaagatatgcacacccagaagttttgctcctagacgtaccttagtcaaatttacgcacttgtacatcaaaatacatgtattacttttgtcctaattaatagtgtttataacagtcaaaacactgaagcaactcaaatgtccactactaaaatgtccaatattagaattgtaattagacagtaagatggctaaattatgatattcttagagtatgaatgccatacagcaatggaaatgaatgtttcacactacattgattcatataaatgaatcatataaacataagatttagtttaaaaaaagcaaagtacaacattacatttggtatgattccattctgcataaagttcaataacaagcaaaactaaattctatttttaggatgctagatagatggaaaaaactataaagaacaccaatgaagtggtaactgttaaagttacgaaagtgatttctctagggagaaactgggaatcatgactgaaaagagacagggattttcagggctatcgacagtattctctttcttaacctagatagtggttacatgcatcctttgtaagtttttttagtttataatcaagtattaattaaagtgtacatttaacttttatacatttttctgtttgttgtatttcagagtaaaataaaattaaaaattataaattttaaaatatttctcaccaaaaagacaggtttgggataagatttaaccaatggaagtaaataagaagcagaactacctattacagattccagagtccaaggtgacaagataaaggcttcattttgaagtctctatcgtatatatatatatttataacatatatatatgttaagtatttgtggcattatattattcaagactctttctgctgcatgtgacagaattgactcatataactgggaaatctagggtcagagatgatttttcacatgattggactgcagagttcatattttgtcatcaagaatctgtatctctgcttttcttgaattttattgtcttaattatgttagtagacaaaaaagtggggcaaaatgactgttggctggcctggattcatatgatcaggacaacttcatttaaaagggactattttttgctacctcgtttaaaagggactgtcttttgctatagctcctgcatttatttaaagtgacacacaacaacaccaccaacaactccctctgtttttcttcctgttggactttggcctggttgggtagggcattctaattgtcacagcccaggtctttagtcaagatcagtgaacaccatcagcccctcctaaacaatggaatggtcttcctataggaagaggggttttgatatcagatgatgggacagtaggatgctaaacaggtacatcacatcatcttgagtgatatacttactacaagatttttagtgtatttaaaaagtaagtcctatacttccaaatcacttttccttctagttcaagagaaagaagcattcattttcctattccaagttaattcttatgaagtgcttttgagccattttccaacatctccctgtgtcctaatacacacaaacattttacctatttaaaaaatatttaactactatcttatgtctctctgcctttttgaagctgaactctttcaaaggatactgaaaagtacaactgtgaatttggattgtggtttaatacctttcaagttatatggctttgggcaagtttcttcaactgagctttagtttcttgttatcatccttctaggcttattatgagtattgagtaccttatgatgagtgtaaagagtcttacatattttgtacctagcacaaaaataatgcagttatgagattaaaaccaggctttacttaatagacctatagttactggcaagtcatttaacttctttgaacttcactagtattatatttataatgtaaaaataatgcctaccttgcaggatttttgtgaatatcaaatggggtcatgaatgaatatgtctaataatggtaactgttgctgttattttttaaattaataattatttgcttttacattaataattatttgcccagccagttttcttttggtccctggtccaactaatttgaatggattacacataggagactaatatatcatacagtgatagaattttatggcttatacattgacattcaatttaaatgtattaagctatttgatttaaagggagaatagacaaatgactagaagttttcattctatttgctttttaatatgtaaacaaaaaatgaagacatgataaataaccttgagtttgaaggttcaccagcattcatctttttttttttttttttttttgagacatggtctcgctctatgacccaggctggagtacagtggcaagatgttggctcactgtagcctcttctcctgggttcaaggaatttttctgcttcagcctgccgagtagctgggattacaggcacatgccaccatgcctggctaatttttgtatttttagtagagatgatgtttcaccatgtgggccagcctggtctcgaactcctgacctcaagtgatcacacacagcctcccaaagtgctgggactgcaggcatgagccaccatgccgggcccattcatttttgttgaagaaaattgggaatatcagtagagtgttcatctccttcatagagaaaggtagatcattccaaaaagatgtgaaacacatcatgtgaagcaggaaatttagttttacactaactatggggattactttaaattatcaaaatgtagttttacttcaaaaaataccttgatgtaaatgatttcaggtgcatcttaaagacttgaaatacttagcactgctttgttttatagtttcttgtggagagaagtagtgagggcttggagattgtctccattcagtgatcatcacaattagtacagatggcagatcattatcaacatttattaccaaacggtgattacatcactcaattctcaattatgcatgtgaggcaggtatttttgttttgtatttcataaagccatggatgatattttgatatcttaaattataatattttaatgtttatcccctcttttccttaatgaaataacactggtgataaagtttctgtacacagcaaaaatggacattcagtcttagagacccaccatattccaacaccttaatattttatttaaagatgtgttgttcaattatgtatttttattgtaactttagaccaattgcataaattggataaattggattatcttattctatgaagcattaatcattgtaataagttaaatagtcattttagtgctttttttttaagtaggtaggtaccaccgtactacctcgtggaggaattgcacgtactaaggtgaagtttgacagtacaacctagcattgcatctcacatcttggttgattttctttatgccgattgagggataagctgaatagtcaacacaaaatatagataatataaaagctttttatatttagcatttggaatagaattacaggaaatcaagtgctaatatagttgcatttggctgccccttgcttctagccttcacaccaatactttccttctacatttttgttggcagttaccaacagattgccctacttgtgtggtatgacttcattaaaaaggcagatatatgcagaattttgctagtttatcttaaagaaatatttaacacttgatatttattgaaggttctatgccaagagttgtggagcggggggtacaacattaaagtggtggttagaagtgcacaaataactgtaatggtatacaacaaagagttttgggattcagagaaagcaggggtctcctcacgttaaagagaaataacaaagtgccacttatgatcagttttaaaagatcagtaatattttaaaggcagagctgtgctatagagtatatcccaacccagttattccctctgagcttgtatacaaaaccatgtggagaaccttgaaactgcagtttgtctgagtcataaaaagcatggggaggaggagggggacattcttcctagtgatacacaagaaatgctgtcacttatatgaaaagcagcatatttttgctgcttcatgttatcaacttaaattccagcaaatcattttaacagaaagatcttagagtaaaaattttacctatgcatctgtttattcttttgagtatccttgtataaagcactttggtaattgtcaatgtataagacagagtctctgtctttaaggaaggaaagataagagaaatttacatttagtgattgccaacaatatgtatatgttgtctcttaaatatatttcacttaatacttgtagcatccctatgacataggtattattatttctaattttttagaagtaaaaaaaatcttaggcattaaaagaggttgcctgctcaaaatcacccagcgagtaattaaaaccttacctgaaattacatctattggtataattccaaaatcatgtatttctcctgcagcgccttttgtatattcatgatctgtttctgggcaaagttttgagaggaatgattgaatataggttcttgtagattatacctttatacaaaagaaaagtgatagattcttagtaaaccaaaatatagttgtccctcagtattgggaactaatgaggaattggtagcagctgcgtgaccttactaaaaataaaaatcagatccgctgctgtaaactcttcactgatttcccactgcacttagaatacattcctaactctttatcatggtcatatcagtgctgtgctacagccaggtcataccagcttttgacggccaattgttaaattttcaggaattctgtgaaccagttgttaagcacagccattgttacaaattaaatgataaaaacttacagttaaataactcatgttaaaaacaaaagtaataagtactcaaaattcatcactttctggttatgttaccactttttactgttgtctgtgctcttgaactatttacattgttttatctgtatgataaaaatggtatatgatggtatgctgcagctctactgttatgcatcacttttctttttttttgcaaatgatattttattttatgcaatttgtttatttactcattcattcaattgcttatttaatcattccttaaaatatataagctgagagctgactatatggatggcaccaggcaaatacaatagatacagtagtgaaaaaaataaacatggtgtcttttgttatggagtccaaagctcagtggagcagtgagtgatactaatcaaacaactgcacaaatgcatctataagtaaattattttaaaagtacagttaaaggaaacaagtaggtgctattaagtacatgatataatatcagggttcaagaaaattttcagagcaaatggcaaatgagatacatatattcagtctgcccttcatgtctgcaggttcaaccaatcgtggatgaaaaatatttggaaacattaataacagtgtaacaagtaaaaatataaataaaaatacattgtaatgacgatttacatagcatttacattgtattaagtattataaagagatgatttaaagtagattactaaaatcatctacttcagtaatgttatatgcaaatataacatatatggttacctgcaaatactgtactatgccattttttttctttttttattttttatttattattattatactttaagttttagggtacatgtgcacaatgtgcaggttagttacatatgtatacatgtgccatgctggtgcgctgcacccactaactcgtcatctagcattaggtatatctcccaatgctaaccctcccccctccccccaacccacaacagtccccagagtgtgatgttccccttcctgtgtccatgtgttctcattgttcagttcccacctatgagggagaatatgcggtgtttggttttttgttcttgcgatagtttactgagaatgatgatttccaatttcatccatgtccctacaaaggacatgaactcatcattttttatggctgcatagtattccatggtgtacatgtgccacattttcttaatccagtctatcattgttggacatttgggttggttccaagtctttgctattgtgaataatgccgcaataaacatacgtgtgtatgtgtctttatagcagcatgatttatagtcctttgggtatataccgagtaatgggatggctgggtcaaatggtatttctagttctagatccctgaggaatcgccacactgacttccacaatggttgaactagtttacagtcccaccgacagtgtaaaagtgttcctatttctccacatcctctccagcacctgttgtttcctgactttttaatgattgccattctaactggtgtgagatggtatctcattgtggttttgatttgcatttctctgatggccagtgatggtgagcattttttcatgtgttttttggctgcataaatgtcttcttttgagaagtgtctcttcatatccttcacccactttttgatggggttgtttgttttttcttgtaaatttgtttgagttcattgtagattctggatattagccctttgtcagatgagtaggttgcgaaaattttctcccattttgtaggtttatgcatcacttttcaactccagtccatttattttctaatattctactctgatctcttcccctacctcctctttacgctcaataattcatggatttgcccttttgaggctattttctagatcttgcaggcatgcctaatgtctttttattctttttgttgttgttgtttctcctctgactatgtattttcatatagcctgtcttcaagctcactgattcttctgcttgatcatctactgttgagagactgatacatttttaagtttgtcagttgaattttttagcttcagaatttctgcttaattattttttattatttcagtctttttgttaactttatctgataggattctgaattttttctctgtattgtcttgaagtcattgagcttcctcaaagtagctattctgaattctcttaaatgtcacatatctctcactccaggattggtccctggtaccttgtttagttcatttgatgaggtcatgttttcctgggtattcttgatgcttgtggatgtttattgatatctgggcattgaaaagttaagtatttattccagtcttcatagtctgaacttatttttacccgtccttcttgagaaggctttccaaagggaattaagtgttgtgatctaagtctttagtcactgaagccatatctgctttaggggatgccccaagccaaataatgctgcaatttttgcagactcgcagagatatagccttggtgggcttgggtaagatctgagagaattcctaaaatctctttttctcttctctcactttcccctgaataaatagtgtttttttctcctcatgctgggcttcctggagttgaggagcagggtgacacaagcactagccaccacagctgggactggctactatggctgcaactgcacttggtcacacctgaagccagcatggtacctgacgactactgcctggctgctgctggtgtttattcaaggccccagggtctttccattcagggtagcaggtttccttctggcccaggatggatctagaaatgcttttcaggagctagggtctggactcaggggattcaggactctgcttcatgttactgtggctgagccggtactcaagttgcaggacaaagtcctctttactgtttcctctcttttccacaagcagaaaaggagtatctcccaagctgccctgcctggagttggggaaggggtgtaagtatagccactcttacttttttgttgttgtttctatttgatcccttggctaccccagctggtgtttcactggattgtatgtaccccaagtccactggcttcaagcccagcacagcaccaggacttgccggaagattgtaatactcgtggcctagactgcttttcaaatttgttcaggacaccagggcactttagtctaccagggggcttcccttctgtctggggccagtctgaatccttccttgttgtgtgcctgctaaattctgccctgtgttgtgttctgctgtgacagggcagcactgagtaccagtgcaaagtcccacaatccctgctctctccctttcccaagtgcatggattctttctctacacagtgctggggggataggataggtgtggtgtagacgatgtaagactgttttttctatcctcttccatgccttcttccttgatatcatgttaaaaccaggtactgtgattgctcacctgattttttgtttttatgaaggtgtttcttgcgtggatagttgttcaatttggtgttcttgagggaggatgattgctgaaggatgattgctatttggccatctagctctgcctcctccaaaattgtctctgatgtttacctttacttccaacacccaacattccctagtctaggacttctgcatccttatgaaactcaagtagagttgcctgtttactcttcccctagggaggcactatacctttatctctgtatccctaaagcctagaacagggcctgcacctcatctgttcagtgactatatgtatgaatgccaaaaggcacataaaccttttatttgccctaatgattttaccacattcaaagaaataaaaacatattccctttataagacatcagatggtaagacatttacttagaaagagagagacttaagtgaattagtatctctaggactggctacagttcagttatcttttttttttctctctctcttttgagatagaatctcaaaactccaggctggagtgcagtggtgcgatctcagctcactgcaacctccacctcccaggtcaagcagttctcctgcctcagcttccccagtatctaggattacatgtacacaccaacatgcccagctattttgtatttttagtagagacggggtttcgtcatgttggccaggctagtctcgaactcctgacctcaggtaatccacccaccttggcatcccaaagtgctgggattacaggcgtgagccaccgcgcccggcctggctacagttatcttacatgcagctattttgtatagccatttgagtagagatctgagaggaagatgaagaggcttacaccttggtaagagaagtattcttggccatatatgttcaagttagtgtcacttgaggctttgatgacaaaggagtaaagaatacagtgtaattgtatcctaaataaccaaacggaagctgaaaaatagttgctaacttgaatagctgaggtcagtggccagaaattttgaaaaggtctcaaacaactcatagataaaaagaaaataagcaaatatttaaagaatcaaaatgaaaacactataatgtatttatttaacttcaggagatgttatttaacaaatttgggtattttgtggtttataattagaaaatagaagtggctgatttgtatgaaatcttgtacaactgcatttctaagtggataaatggaactctacttgattcacttgctgaagtatgaagttagtctaacaaatgtatgaaataccataatcaaccaaatgtaaattttcaaggaagtaatatttaaagtagatgtttgtataatagttacatcctaggacattgaataagtacaactttttctgtatgcttggtgtaatttctagaatattagatatgtccctttccatattctttcacctgttgataccactgtttagaggtttgttcctttgacttcagactttattccctgttcagataaaaatacctctgagaaagctagtatgttagagtttactggccatttccctgaaaactgtattttacagaaagtagcaacatcaagaaaacgcagggaggatagtctcacgctatttaccaaaatttaaaatgcatttattttttcacccagcattcccccttttgggaatgtgctctaccccaccccatttttgcatatgtacaaaatgatacatatgcaaggtttattgaagctttatatgattaaaaaattaggaacatctcaagtatcaataggaaacttgttaaatgagctatagtacttttatataatggaatactatgtaattgcttttaaaaaaataaagagacaactctttatatactgagatagaaagatttccaacatatattgttaaggaaaaaaatcaagatgtataacaatgtatatagaatattatcttttatgtgggatgggacaaaataaaattaaaaatgtaattattttatttgcatagataatcagtggcagaatacaggagaaattatttagagtagatatgaggctatgcaaaagaggttggggggtgtaggtaccggggattagtttatatataatgatagggaggagcgagacttttacctttagatctttttacattgtttttattttattttattttattttttttttagacggggtctcgctctgtcacccatgctgtaatgcagtgacgtgattttgctcactgcaacctccacctcccaggctcaagcgatccttccacctcatcctcccaagtagctggactacacactcatgttgccacactcggctaatttttttattctttgtagagacagggttttgccatgttggtcaggctggtctcgaactcctgggcttaagtgatctggctgccttggcctcccaaagtgtgctttggttttttaatcatgagtgtattgcctgtttttaaaggtagcctaatgaatgaatgacaacatgattaaaattaacaaaagaagataattcatctcaagtaaggaggtcatgtcactctgccaaagactggctctgaaggacttcatttgctccaggccttcagctacttatgcagaggactaataacatgaaggaacttttttgacattctggcaaaatgccacttatttatattgtatatgtatatatttttctgtagatgccagaggaacaagcattctgtgttttggtgaaaatcatgtacgactatggtttgagagacctctacagaaacaacttcgaagatcttcattgcaaattctaccagttggagagactaatgcaggtaaataaaaattaggaacttttatcactcagggatttgttgagtcatagaaaaagcctaatagagttggtaagcaataatgaattatagaagtttaatggaatattatagaaaatgtacatggatttagtttcagaccaatatctacattggtctatcataatatgtttatttagccattttactattttaaaaatatctcacattttaaatgttcaagttaaatatactttgaagtgagaatctaatgagtttaatcattaagagattgccaagtattgtttgtagaggaatggagatatttacagagtaaaaattgaaatacctaagagctttctgcatactaattagcaccacttccttatttgagtccacgtagaacacttggaaaagccagaaagatattcataagagaataaaacatactaaaatactgtagggatacatttaaaaatttttaaatataattcctaatctcaatgttgttgttgtgctttacaatgcgtatttataaatgtgtgtgagaaacatgcatccttttatatataccaaatattacacagtaaaaaagattgtgaccacaggcaaagtgattgaccagagctgacaaaaggaatttttaactagctttggagttctacctgaagttgataatcttaaatttataatgggtttttgtggcatgtttatgtgactttgtttaaaaggggttttgggaatccaagagaaatgtgaaggagatacatggatggattgattccatattggggaagggtaaaatggttgaggaaggaggttcgtggaatgtgagagcagaagatgctagtaggagctcattgatatgaactgccaggggatccgtaggtgtctaaagagggaagtgaagccagtaggagactgagagattagaagaacagggcagtagaggatgaatttgcagtgaggttaaaggaacaatttattgggagaagggaatgtaggagggtagaagactttaaaattgaaaagaaataaaaggaggcagggatgtaaaacgagccataagtacaatgacaaatgggcattaaggaggaaaaagactatgtagaagaatctggtaaatatggatattaacagcaataagctcctttttaacgatttaattctaccaagtaaatatttgggattactcgctttttgccttttatttaccaaaaaattcatatattttcaaaggtcagtattcctaagggctttgagaatcaagtaaatatacctaataaataacagatgtgtggtactatgaagaacctcaaccacatttttctgttagcagttttttttcagttaactgaatgagcatttggacgttccatttgaagtacctaatgggcacatttggctatttttcaaagagagcatgtagttcaagaaatggcttattttgttttttattcttctttttgtggtctatttaggaaaacaaaatgaaggtggcctttgtctttcagttatggtaatagctatgctaatactttgtaccttgctgttcatgcttttgaaaaccatttgcttgtttaaattgggagaaaaaaataaagttaccataaaggcatttttagaagatatccaattttatatattatacctttgcataatttctttgctttgccatttttaatatgctgaagacagatttctaaatagtttgtcgtggcttagaattttctaagtgttcaaaaaatatactgaaacatcatagaccccagattagatgatttccaaagagaagatacatttcttttctagctagttaagaattgaaccctgggctgggtacagtggctcacacctgtaatcccagcactttgggaggccaagtcgggcagatcacttgaggtcaggagttcgagaccagccaggctaatatggtgaaacactgtctctagtaaaaaatacaaaaaataatcgggcctggtggagggtgcctataatctcagctacttggaaggctgaggcaggaaaatggcttgaacctgggaggcggaggttgcagtgagccaggatcatgccactgtactccagcctggatgacagagcaagactcttatctcaaaaaaaaaaaaaaaaaatttaaccctgaatggggatgctatgacttgaccctggagtcaagatactcattacactacagatgctctggtagaatgagaattttgcaagaatcaagaacagtcaagtgagcaagagatggtctttcttagttgtttataataagtctgtttttattttcctcaattatctgtcatatccctaattctcatctgctgtcatcacttctgtgcagttatacaagacaaccaatactagaatagagttacagcgatcatagaaagctgtttgtaagttgcagttgtggcaggaacttcattgttctgctgcaagcttctcattgctcctaaattttccactttgacttttaggaacagctaccggacctgcatagccatttttctgatctgaacctggaagctcatatgtatgcatcccagtggtttctcactctttttactgccaagttcccactctgcatggtgttccacatcattgacttactgctttgtgaggtagagtgactcccatctttcactaagccaaaatagaaagtagtttctactaaaaatggttacagttttcttccttttgtttttgcctgtgacattaagccataaatactcactgaccaaaaagctgtatttgaattttcagtaaaaactattttaattgtaattttattatttctgaggaatgaaaatgttaaggcatatataattcctacaaagtaaaatgggtgattaaatttgcataattaaattcataataagcctatatctgtataataatgttttaccagtataaaatgcctttaaggttaaataaatgaatttagaattgggtgttttttaatattaatgcagttatactgcaagagtgaatataaatgagatttttataataactaatttctcagttcatcagatatctttctgtttatcatgtttgggactgctgcgaaatgatgagacaaatgataaactaaagctattatgtcatataattatatttttatatagtagaatatttcaaaaattagtttgtaaaatttcttaggtgtttatatttgtgtattttattgtttttagttccttagatggctatatttatttactcttttaaagaaataaacagtattatgcatatatatggcttatattggtcatcaaaatgtttgactatcttagcagtaatagggaatttgctagataagaagtgtatattttcaatggcagtataaatgtatataaaatatagctatcttaaaaagcaggactaatcaaaagtataagcttatctatgtgattataagcttaatatataatctagacagttttgtattactatgcttcttaaggtaaacatcctttaaaaaaaattttttttgtataaatttaaggggtacaagtgatgttttgctacgtggatatattgtgtagtggttaagtctgggcttttagtgtaaccatcacttgaataatgcacattgtacctgttgaataatttcttatcccctacccccctctcactgtcccatgtgagtctccaatgtctattattacaaattctgtgtccatgtatacacattatttggcagtatttgactttctgagttgttttacttaacataatggcctccagttccatccatgttgctgctaatgacatgattttactcttttttttggctgaataatgctacattgtatgtacataccacattttctttatccagtcatccactgatggacacttaacgctgattttgcatctttgctattataaatagtgctgcgataagcatataagtgcacgaatctttttttatacactgatttcttttcctttggataggtacccaatagtgggattgctggattgaatggtagttctatttttaattctttgagaaatttccatactgttttccatagaggttatactaatttacattctcaccagcagtgtggactcttttctctacatcctcactaacatctgttattttttgactttttaataatagccattctgactgtcataagataatatcatgttatgattttaatttgcatttctttgataattagtaatgttgaacattttttcatatgctcattggccatttgtatatcttcttttgaaaaatgtctgtttatgtcctttgcccgctttttaatggggctagttggtttttctgttgtcattgagttgtttaaagatttctctttcttttcgtttccttttctattctcttttctttctctttttgagatgtagtctcactctgtcacctaggctggagtgcagtggcatgatctcagctcactgcaacctccacctgccgggttcaagcaattctcctgcctcggcctcccaggtagctggaactacagacacacaacaccatgcccagctaattttttgtatttttagtagagatggggtttcaccatgctggccaggctggtctcaaactcggtctcccaaagtgctgggattagaggcatgagccactgcttccagccagattcctctttcttaaaaggaaagtctaatgattttaatcacactaggaattagaagtttaaatgtaaaaataagatttaaaagatgcaatgtgtaaactatataaagcataaaaatgttatttctcagcctactaaaacagtaacaattatatatgcaggcaaggctggtcttttgctcttcagtggctttagttagtacttgcctaatacctgaaggtcacagggcatttgtaagcatgtaagagttttaatcatttgtactgtactttgataaagaagggttcagtgacttgccaggcttgcagaataggtttccaaatcctgaatataacagctagagaatctgatttataatatgttaattctccgacttgttttacttacaaattagtttgtaaaatgcctttctaaatgtatcttaaaggaagaattcagaattaggagctaaaactttattcaaagtcaccatgttgtaatcacaatattcacaaagcatatgtggttatttgtaccaaaaactctacctgattatccaaattggtgtagtgaacagttccaactccgctattttatagggcaatactctttgaaagtataaaccaaattcacatcttcaagttctagaatattaaaataagtgaatgctaaaagttttgataaatattcatagacttttatatactgagctgagtttagtatttcatggtatttcataaaaataggaaagtgggggtatgacattttaacagtttttgagttatatatagtatgagcttgcaaatatttgttattgcttcacaatttttgcagaaagagattaatttcatactagattggttctatagtgttcattgtagaaaagggaataaaattaatgtgcttaatcataaccaactaaatgtgatttctcaatcacttttcctagagtggtatctctgcccttcagttcactgggatggtgactttctaaagtgtctgcccgaatgttggcacccgtggcatcggaacattgtccatgggttttctggaacctagattcaaattttatcttgaagatacatgaatttctaatgtcagttaagaaaactagcaacatttgtgctacagaaaagataaataaatttattagccttcccgtcacttgtcaactgtgacttacaatcagtgtttgaaaggtcataatgttcattaatattaataagaacatcatagatattacctttcctccccttaaacctgtactctatagctgtttaaggaagttggaaaacttttcaaaacatagattgtaatcatagcatcatgatgttcggggaagtaaatggtaacatcctttaccattaaaattgcttttcagaataatctattggaaacaatattgtagtgtgcctcaggatatttattctttccactaactcatctttgtcaagaattattttacaaaggaaatttttgaataaacttttacttcctgcatgtctgtgttttctttttgcccctttccttcttgtagttaataaaatatttatatcaaaagctattatttcatatgtgatgacatattctaagaattggtaaacacagtcttaaatagattatccataggtatttgtttttgtcatattctctgtttttaagaaaacaatttaaattttgaggttacgactcaatgtttacttaaaaatggaaggataggaagctctcaggtagaaaagtattgacttttcaaagttttacattctgatttttaacatgtgcaacatgtttactcaaagatcccattgcaaagtgaaaaagaaagacactgagtttgaaactttatgcttagaagacgtatcatgacatgctttcctaagctatattattttaaagatttcttcattcattctgaggttaagccaataaagttaatttagcagaaaagagaagaattttatagaccttgacaatgcagcctgactgaacaactgctaattattaatagttttatttaaagtatttgcttaaatctgaatatatgataacatgggttagttaattccagaatgatggatagcaatgggatttgaaactggagtttaaaaatacattttcttatgttaagatgagtgaaaatctgttttgattgtcttttagtcagtaactgaaatgaaaatcatttttaaaaaaacaaacctatatcttattatctgcctttatctgtttagcaagtctaaatgtattaacatttatagtgtaaatattatgctattaacctatcgataataaaacattgcagtctttaaaataactttttattgaagtataataacagataaaagaaaatttgcaaatattaatgtagaacttaatgatttttcaaaaaatggacataacgaagtaaccagcacccagatttaaaaaagaacaaaaaggaacattatctgcatttcagaaaccctcttccccttcactgcccttttccagtaactacactctgaaaagtaatcactttcctgacttttaatgccatagtttagctttgcttgttttggaactttatgtatgtggaatcatacaatacgaactcttttctgtctaactttttttagtcatcattatgtttgtgagattcatccgtatcattgcatttaggcatagtttagttttccattctcccattctattgttgacggttatttgagttgtttctagtttccagaaggccattatgaatagtgctccgtgtgaatcttttgaactttcttgaacttgtcttttagttaacgtacctatgcacttctgtgagtacacatcaaggagtagaattgttgtgttaggatgcacatacattcagctttaatggatactgccaaacagccttccaaggtagcatgagcattaactttgagttgtttttattcaataaagatctttcttgtgatcaagggcaaggttttgttctgttttgttttgttttgttttgttttgttttgtttttaggtcgcagataatgggtcagataagagtccatgaatacgcaacaaaatgaaactcatttggtgattggaatgattgacctgatctctgaagttgcatacaggcagattgaaagctaagaactggacctaaaagcagagtccctttagtgcttttatgagagaagttactatgatggggaaaatccagcaaagtattttcagtcttacaaagagcaatgtagagacggtatgacatttgagttaggatattggactttttagtcaacctttcctagacagccttgttcaagttacttgacctatgtaaatctcattttctttgtttgtgtaatgagactaacaatacctgtctctcaggtttagtgtaagaattagatgagattatgatatcaagtacttaagtactctgcctactatacagtattcaattaataataacattgccctgcagtctgctccatccatctgtatagcccatttagttgcttcttaatttcttcaattatctaggtttctaatcaccttcccctccatcacccagtggttgagatgcttctttggtaaaagcaaaattttaagtgagtgaccttaatggaagcttaattctatttcctttttcagtagtgattcaaatactgctctaaaagtgttttttgcttctcctccacattctttcagaagacataaggaaaatactggtatttcttttagtcttcacagaataactgacagccggtgtttgaagttgactcttcccagatagttcaatttttagagtaccaaatatgttcagctttatatagtaacttggtattttcatgaaatttaaggaaatcgttgacccttcaaattagaatgtatcttctgcttctcttctcttctcaggatgttgaaaaaatgacagtactacattatttgattaaatatcaccaggtataattctctcaaagcagttttcagaagttgttatctgaagagtagattcattatttattacacaatattctccctccttatccccattctcccccacaaaaaactcatcagaatgagcttaatacaagcaagattaagactctgacataggggagctggcaagatggccaaataggaagagctctggtctgcagctcccaatgagaccaatgcagagggtgggtgatttctgcattttcaactgaggtacccggttcatctcactgggactggttagacagtgggtgcagcccatgaaggattaacagaagcagggtggggcatcacctcacctgggaagcacaaggggtcaaggaactccctcccctagctgagggaagctgtaaagtactctgccatgagggacagtgctatccagcccagatactacacttttcccatggtcttcgcaacctacagaccaggagattccctcgggtgcctgcaccaccagggccctgagtttcaagcataaaactgggcagtcgtttgggcagacaccaagctagctgcaggagtttttgtttgtttgttttgttttgttttgttttgtttttaccccagtggtgcctggaatgccagtgagacagaactgttcactcccctggaaagggggctgaagccagggagttgagtggtctgtctcagcagaacctacccccatggcatccaacaagctaagattcactggcttgaaattctcactgccagcacagcattctgaagtcaagctgggatgcttgagcttggtgtggggagaggtgctgccattactgaggcttgagtacgcagttttcccctcacagtgtaaacaaagcctccaggaaattcgaactagttgtggaacccaccgcagtgcagcaaagctgctgtagccatagcacctctctagattcatgctctctgggcagggcatctctgaaagaaaggcagcagccccagtcagaggcttatagataaaactcccatctccctgggacagagcacctgggggaaggggtggctgtgggcgcagcttcagcagacttaaacattccagcctgccagctctgaagagaacagtggatctcccagtacagtgctcgagctctgctaagggacagacagcctcctcaagtggatccctgatacctatgccacctgactgggagacacctctgaagaggggttgacagataactcatacagaagagctctggctggcatctggcaggtgcccctctctgatgaagcttccagaggaaggaacagacagcgatctttgctgttttgaagcctctgctggtgatatacccaggcaaacaggttctgcagtggacctccagcaaactccagcagacctgcaaaaagggccctgactattagaaggaaaactagcaaacagaaagcaatagtatcaacatcaacaaaaaggacacccatgcaaaaatcccatctgaaggtcaccaacatcaaagaccaaagatagataaatccatgaagatgaggaaaagccagcgcaaaaaggctgaaaattccaaaaaccagaatgcctcttctccaaaggatcacagctccttgccagcaagagaatagaactggatggagaatgagtttgtcgaattgacataagtaggcttcagaagattggtaataacaaactcctctgagctaaagacacagtgcaagggagccaaaaaccttgataaaaggttacagaaactgctaactagaataactagtttagagaagaacataaatgacctgatggagctgaaaaacacagcacgagaacttcgtgaagcatacacaagtatcaatagccaaattgatcaagtggaagaaaggatatcagcgattgaagatcaacttaatgaaataaaacaggaagacaagattagagaacaaagaatgaaaaggaagaaacaaagcctccaagaaatatgggactgggaaaagaccaaacctacgtttgactggtgtacctgaaagtgatggggagaatggaaccaagttggaaaacacacttcaggatattatccaggagaacttctccaacctagcaagacaggccaatattcaaattcaggaaatacagagaacaccacagagatactattcctttgtggaaccccacaaagaacaaccacaagacagataatcatcagattcaccaatgttgaaatgaaggaaaaaatgttaagggaagccagagagaaaggtcgggttactcacaaagggaagcccatcagactaacagtggatctctctgcagaaaccctgcaagctagaagagagtgggggccaatttttaacattcttaaagaaaataattttcaaccagaatttcatatccagccaaactaagcttcataagtgaaggagaaataaaatcctttacagacaagcaaatgctgagggattttgtcaccaccaggcctgccttacaagagctcttgaaggaagcactaaatatggaaagaccagtaccagccactgcaaaaacaaaacaaattgtaaagaccatcaacactatgaagatactgcatcaactaatggacaaaataaccagctagcatcatatgacagtatcaaattcacacataacaaaattaaccttaaatgtaaataggctaaataccccaattaaaagacagactggcaaattggataaagagtcaagacccattggtgtgctgtggagcagggggcggtgctcatcggggaggctcaggctgcgcaggagcccacggtggcggggaggctcaggcatggcgggctgcaggtcccaagccctgccccacagggaggcagctaaagcccggcgagaagtcgagcacagcagctgctggcccaaacacagcttagcagtgctaagcccctcactgtctggggccggcagggccagctggccgctgtgagtgcggggcctgccgagcccacgcccacccggaactcacgctggcccgcaagtgccatgtacagccccggttcccacctgcgcctctccctccacacctccctgcaagctgagggagccagctccagccttggccagcccaggaaggggctcccacagtgcagcggtgggctgaagggctcctcaagtgccgccaaagtgggagcccaggcagaggaggcactgagagtgagtgagggctgccggcacgctgtcacctctcagagggagaggcgtgggtgggaaccgaggctgcgcacagtgcttgcgggccagaacgagttccaggtgggcgcgggcttggcggaccccgcactcggagcggctggcctgcgctgctggccctgggcagtgaggtgcttcgcacccgggccagcagctgtggagggtgcaccagtcccccagcactgctggcccacccgcaccacgctcgaattctcgccaggccttagctgcctccccatagggcagggttcgggacctgcagcctgccgtgcccgagtgccccctggcactcctgccctccacgggctcccgcacgcccgagcctccctgactggcactgccccctactccgggggcctggtcacaccaaccgcccaagggctgaggagtgtgggcacatggcatgggactggtgggtacctccacccatggccctggcacaggatccactaggcgaagccagctgagcttctgagtcgggtgggaacttggagaacttttatgtttagctagaggattgtaaatgcaccagtcagcactgtgtctagctcaaggtttgtaaacacaccaatcagtgctctgtgtctagataatctagtggggacttggagaacttttgtgtctagctaaaggattgtatatgcaccagtcagcactttgtgtctagctcaaggtttgtaaacacgccagtcagcaccctgtcaaaacggaccaatcggctctctgtaaaatggaccaatcagctgtctgtaaaacggaccaatcagctctctgtaaaacagaccaatcagcaggatgtgggtggggccagataagagaataaaagcaggctgcccgagcagtcaccttccggactgtggaagctttgttcttttgctctttgcagtaaattttgttgctgctcagtctttgggtccgcactgcctttatgagctgtaagactcactgcgaaggtctgcagcttcactcctgaagctagtgagaccacgaacccactgggagggacgaacaactccagacgcgccacctttaagaactgtaacactcaccgcgaaggtctgcagcttcacttctgaagccagcgagaccacgaacccaccataaggaagaaactccagacacatctgaacatctgaaggagcaaactgtggacacaccatctttaagaactgtaacactcactgtgagagtctgcggcttcattcttgaagtcagcgagaccaagaacccaccaattccggacacagtggttttcccctgcagtcaggctgcccagcagtagctactttctctaagaagttttccctgatcacccgttcttaaatggatatatccttttcctttctctcttagcaccccgtggttggtgtttatttattgacttacttacttactcctccaacctccccagccaaactttgcgtcattccatcagtcagtggcctgctggtgtctgccagtgcttgctggtgtgctcttctgctggtgtgtgttcctcccaacgtccagccgcttgtgtctgtgcccccagggtcttggggattttatagacacaagatgggggcatggcggaccagggtggtcttgggaaatgcaatatttggggacgaaaacagaaatgcctctcctgatttaggtccaatggcacaggcccagaggtggagccctcaccaggagccccacccttctgctcccagcacttccttgcccccatactatatcattaagacatacattgaagtgctatgtatctcacttctagaagtaaaacaatgtcaatgagattagaagctttatatatacctcttcctgactacatcttctttggtcttcctcaggagaaccattatgaagaatttagtgttaatcattcccatgcatgtctgttttttttactacatatgtatgtatctctggacaatttataattgagaatatttgaaaaatattattgcagtctgatatggttttgatatttgtcccttccagatctcatgttgaagtgtaatctccattgctggaggtgaggccttgtgggaggtattggatgatgggggcagatctttcatgaatggtttagcaccatccccttggcaatgagtgagttcttattctgagttcatgggagatatggttgtttagaagactgtggcacctttccctcaaaccctgctctcgtttactctctcactgtatgatgtgctggctcgcccttgtccttccactgtgatagtaagcttcctgaggccctcaccagcagcagatgctggcactatgctttgtgtacagcctgaagaactgtaagccaaaataaaacctcttttgtttataaattacccagcttcaggtgttcctttatagcaaagcatgaaccagactaacacacactcactagtttatcaagtctacctccaaaataggtcttgaacctttattctttctccaagtcagcattatctcctattcagtaacttcctatctgttcttcccacttgtcttcctgtcatttttttcccattattctccatagcatccagagaggattttgtaaaacacataaccgattacactcctctactgaaaacccttctgtggtttcccactaaataaaactcacattgtttcatttggcctgcagttattcccttccttcctccccagtggtatccaaaggtcagcctttttcctgctctttgtagtggaacactggtcttcttttagtttctggaacattgaaaacatttgtatattttttaggacagcagggatgttaatttaaaaaaaaaaagaaaaacattttttcctctttgtgcttggaatgaactactcactctaccttgctagctacttcctctaagaaattttccctgatcacccattcttaaatggatacatccttttcctttctctcttagcaccctgtggttggtgttttatttattgacttactttgtattgcttttaaaatgcctatttcccccaccagattataaatttctgaaaggaagagctatgtcttttttgtgtgcagctgaatacctagtatctaactttacatatggtagacatactcaaagtatctgttgaaggaaaataggaatgaagaagtaacggacataattatttttatcatcttcatttaaattctacaggctgaaaaataactttgctcttgagttttaagaggaaaaaataagttgttttagtttagatattttaagaaacagaaacctagacatagtagctccagtacagtgggggtttattgtaaagatagaggaaatccaggagaagttgagcaagtagacttcaggaaggacaggcaccaaagttaacctagacactcgtctgtattattctctatcaatctctatgaatcagattttctcccctctttcctgacctacctctttgtagctttgttttttttacagggcctaaaagatctctaagtatttctagtgtgtgtgtaatttaagactaaaattcttaatgttgactgcattgaaagtagacatttgataaatgtaatattaagtaaaattctgatgcatctcaagacaagctatatattagcttggcataggaatttaattagagtggagcatagcatagttttaatatagggcgtaatctttaaaattataatttggtcctcagggttgaagtggtagctggatccaaatcattttcatagtatacatttgcaggtgaggttataagtaaaagcagtgtgcaattttgacccatataaataattttaatgattattggcaaaagtatatgaaatatttgaatgcttcccattgtctagaaactgtattgggaaagcatcttctaagtaataagtgttgaaagacctccattgtaattattagtaacaacattctttcaatttataaattatctatattgtacaaaagagaaggaactcatgcagtatcagtggaagtggattaaaaatgagacctttcattgaagagtagttatttccctttaccaccttgtttcataaatatccaattttagctgataaactttcagacttactgtttaagtctcaaatatttgaggacagaatactggcaggctttactggagagtatttctgggccacacactgtactaaaagatttacataccttgtcacactattcttaccttctccaaacagactgcagcccttcacacccctcatacagttgcccaatttagaaataggtttttcaacttttttcaattcacatgggcagacgctgtgattatccttgtccttcatgtcccttagtaaataacagatggtctttgtctcttttaagaaatcctcattacctactctcattttaagacagaaatagtaatcaattcccaatatcattttgggtctttcagtccaagacttgactctgttgatctcatatcccaggtcctcctatggtctggcaagacttctccatgttaaattccttcacctgatgctcctggtattcttttccagctgcacttttcaggcacagttttccattggtatccacagggtttaaagttcccctcatcccccacagataccaaaatctgaggatgctcaagttccctgtataaaatggcataatatttgcatataacctaacacatccttccatatgctttacatcatctctagataacttataatacataatacattgtaaatggtatgtgaatagttgttatttgtttttaagtttacgttatttttattgttattatttttattttaaagatttttccatctgcagttttccatctgttgtttgaatccacatatgcagaatccaccgatagggagggcaactgaacttaattatctgcatccattgtttggcatttagtagtagtagtatttttagagacagggtcttgttgtgttgccgagagtagagtgcagtggctattcacagacattatcatcatagtggcgcactacagccttgaaatcctgggctcaggtgagcctcctacctcagtctcccaagtagctgggactgcaggtatgcgccactgtacccagctgtttggcatttttaaccaaagagtagtttaacctttttcttatttatccagggcttcttaaccatatctaaacatacaatatttagctaccagtactagaactgttgtttgcatttgttaaaaaagaggcataataggaccttctggtctcctactttttgggttgtctcaccgggactttcagaggctcttattttttatttttttctttcgatacctttggtatgaaagctgttattttttagaagtccacttgacattttgcttcttgtcctcatcctagtagtatagcccattttgctcttcttaggaatatgccagaaaatttttcataattgaataaaacaatttcctgctggtcctctggctcattgacctattggatttcagcttggaccacatcatgtctggtaattatttcttaaggcacttaaagcacctggtagtttgtttacttacttacttcgtgtagttgttctcctaacatcccaatgaagtaggtacaccctactttgtagactctaaagattcttggttatgctcattggcaggcaagaatccattttatccataagaatccttaatacagagaagaattagtgcattcttagtgtttatcatctctgttaccttgcaaatatacataaaagatccctcgttaatattaacatatgaattttaggccaggtgcagtggctcaggcctgtaattccagcattttgggaggctgaggtgggatgatcatttgaaatcaggaggctgagaccagcctgatcaacgtggcgagaccctgtgtctatcaaaagttaaaaaatttaggtaggcatgctgggcacaactgtactcccagttactcaggaggctgaggcagaggatcgcttgagcccaggagtttgaggctacagtgagctatgatagcgccactgtactccagcctgggcaacagaacgagattcctgtctcaaaaacaaacaaatgtatgactgtaaaagaatgaaagataaatatccaatagtactgattaaacctctcgtttaagtgcccttttttgttcccgttaaatagaatcaaagcacattttatctaataatgtataagctttcagcctgaaaaacagcttaaaataagtgactaaggttgaagctaatatgagtcaaccttaaaacatgcaaaatttttacaaaaaacaggtcacctttagatgccaggtattactttgcctattcaccaatctagatgtattatctaattcttgtcttagaccttacatttttttccaaaatcagtatagttgctttctgtttgtctggtggtgaaccgcatgataactttacaagtactgctggttctatgagagtctttttcttactatcagaagagcatggtaacagtccaatactaaaagaaaaaggaagtacgttagttgattataccagtgaatcttgaagaacatatcaagtaattcttttctccaaacttcaaactgttatagttcacacggaactaatcttgggtagggaggcagatggggtgggcttcctctgtctgctgcttcctgtcccagttgctcctcaacagtaacacctgagtcttcttagccacctttctcagtacctcaggaaacctctgtgaagctttctttctccttacttattcctccagactctgttgtcttcttctttcattcttctgttgtcttcttattttattcttttgccctgtggtcttccttccttttaggtttttggtttgagttttggttattcaatctcacctaatttcacctgggaaaatttttgagatccaatcaggttgaagaagaaagggaaagaaaaccacttagcactagtccctcaggatctaccgtatataagccaaacagacattctcctctgccagaatgctcatctgttggcataactttgttcctaagaatctctacctcacttctctgcttagagttgtattataaaagacccccttctattatcctgggtcaataagtgcacaagctcaaaaggaaaagaagggatgtgctgtgccccaagaaaggatgatagaggaagaaaaatcctgtcctggctcgtctgatgtctcagttggatattacccaattcttaatgtttaataagcccatttatttttgaggcccttggcatcatttgtcatcgtgtactattttaatggcaataaaacgttcctccagctgtatcaggctgagtgtaaggatggtggagacccaaagcagtttacatgaaaccctccatgggaaggagaggagagaaattcaggatgaaactacagccacagccagaatggtggactgaagtaccagtgttccctcagatgggggaactcctttatagtgtggtaggttttcttttcttttcctttttttttttttttttttgagacagagtttcgctcttgttgcccaggctggagtgcaatggtgccatctcggctcaccacaacctctgcttcccagcttcaagctattctccttcctcagcctcccgagtagctgggattacaggcatgtgctactatgcctggatatttctgtatttttagtagagatggggtttctccatgttggtcaggctggtctcaaacttctaacctcaggttatcctcccgcctcagcttcccaaagtgctgggattacaggcgtgagccaccgcacccggcctatagtatggtaggttttctgaggccttctttataccagtattaaaaatgaatttttaaaattgtgccagaattaagattttttatctatttttctccaagaattattagccactttaaaagatatctttaataattaaagataaaattggattttatttgaaaagtactgataaacctgaattacatgttacgtaatatattaactgtcttcctatcttcaaccttcaaatctataatagactcgatatcaaatagtactttgaacccagtagagtttcacaacctttcaagtgtagaaccaatcagtcaacaagcatctattaaatctctctaagttcaagaaaagatcctttaatttaatctagcatttggataaaacccttgaaaaaattggttgttggttacactttttctacttttccttaatggggctacttaaagatttatttaggtcagatatggccaactcaaatgcacaaaaatgagtgaaatgtgctaggtataagacaagatggagtattgaggactgggatgaactgcagagtacatattcacgtaaaggaactcaaattcaatttttataaaaagctgaggccaaatagagtgtatcatcagtccaaattcagccaaaggctgcagtttgtgacctctgatttagatagcaagatgaaatattatttggttgggatttttggaggtggtaggagtgactccaaatcataataaattaatatatatgtactttagaagcccatattgcaagacttgtatttatgatggctataatatatattgataaaagagtaagtataattatgcctagaagcataagacagtatttctcaaagtgtagttcatagcaactttcactagaataatttgggaggggtgggagagggactatttcaaaacttactacaaagctatagtaatcaaaactgcatggtaatggcataggtgtaaatctatagattaacagaatggaaatacactcacgtatttgtgggcatttgattttcaacaaggatgccaagacaatttagtaaggaatgaatggccttttcaacaaatgttgctgaggtaactggagatagctagctagctagatgtagatagatagatagatagatagatagatagatagatagatagacagacagatagttggtttttttttttttgagacagggtctggctctgttgcccaggctggagtgcagtggcacgatctcagctcactgcaacctctgcctacctctgcctccagagctcaagcactcctcccacctcagcttcctgagtggctgggactacaggtgcatgccactatgggcctggctaattttttaattttttgtagagacagggttttgccatgttgcccaggctggtctcaaactcctgagctcaagtaatccgcccacctcagcctcccagagtactaggattacaggcttgagccaccggtcccggctggtaactggatattgacttataaaagaatgaagttgcacccctacttcacacccctctctccatataaaagaatgaagttgtacccctacctctatggcaaatccatagagatagaaagtagattagtttcctagagttgaagagaggagggattgacgagtgagtgcttacaggaaaaagttttcttttggagatgatgcaatgttcaggaattaggtagtgatgatggttgtacagccttgcaaatatactaaaaaccaactgaactgtacatttttgaagaacaaattttatggtgtttgaattacatctcaatgtaacaaaataacttgaagcaggagagattgctcattaaagataaaaattctagaggtcatcttagactcaagcttctttgagaatatggctctagaaatctacaagtttaacaaatatactcaggtttatttcctaatgactaggaaatactgatttaacagttgtgtatacttgtacattgaaatgtgtttaggctaaaggacatgtgctttttgatcattttaatcatcagcagcaaagagttatgtggtattactttctgtcccatatgagagttatcagatgataaaggtgtgatgctttctctggaggaacaagaagacggccatacatagaagcatgaaatggtgtactttttcatttctttgaatttgttactttggcaaattctgggaagaaagataataattcaacgtaatgaattcagagaagcacaaaacttaagggaaatatccagcaatatttctgtggttgctttgtttttagtgtttattttggggatgaaaaccttggtgtgttgatttttctcaaggctttcttggtcatgtgttactgtgggcctttcaacaaagccaagttgacagagaacagatgcatattttaataactaaacttcctcagcaatagtatctggatcagattggtttcacagcagtgttgcagcaggataaattataattaaaaataggcaggtattttatttcatgaagatttaggggaagaacaagatggaactttttagagttagcagttaccaaataggggaatgaaggtagatctgcaatttcccagtacaaagtatttgggggcttattcagagttttacttgcactgagttgataaatggtatatgatcatcagtagtatcctataaatattaaactgtaagtctcttttgaaaatctaaaattactcctttttctaaattatcaaaggttttaaaacatcaaattcacaaataccttttttatttaaagagaaagtaggatttgatactcaatttttttgttgttgttgagacggagtcttgctctgtgtccaggctggagtgcaatggcgccatctcagcccactgcaccctctgaatccctggttcaagcgattcttctgccacagcctccctagtagttgggattacaggcatgcgccaccatgcccagctaatttttgtatttttagtagagatggggtttcaccatgttggccaggatggtccccatctcctgaccttatgatccacccgccccacccacaaagtgctgtgattataggtgtgagccaccgcgcctggccgatactcaatttttttatggttgatgccagtcacacttactttggctaatcctgtttctttaacgataaaaatagatgatgaagcttaaaagattctacacttacacgaatggtatattatattgttttgttatatgtaagatgtacgaaaagtactttgtttaattagggtctcggaacatgaatatgactagcttttcccatttttccttttttatcgcaagcttctttttttttttgagacggagtttcactcttgttgcccaggctggagtgcagtggtgcaatctcggctcactgcaacctctgtctcctgggttcaagcgattcccctgcctcagcctcccaagtggctgggattacaggcgcccaccaccacgtctggctaattttttatatttttagtagagatggggtttcatcatgttgtccaggctggtcgtgagctcctgacctcaggtgatctacctgcctcagcctcccaaagtactgggattacaggtgtgagccactgcacctggcctttatctcaagcttctaccagtagtgataaatggctagcaagaatcttctatgccttagcctgaaggagatgggttccattaccaatcttctttcttccaaaatatagaacttcaggtatttgcccgaggctgcaccctcagccaatattttggctctattttggcctcagccaatatgttgtgctctatattaggcaagtcacagtacatgatggagacacagaactgatgaacattttcaaaaggaggcatgctggagtgattcaatacaaataagatagacagactcttgcattatgttgacccataggaatttgctgggtttttttgtttgtttttgagaaggagttttcgctcttgttgcccaggctggagtgcaatggtgcaatctcagcccactgcaatctccacctcctgggttccagtgattctcctgcctcagcctcccaagtagctgggattacaggtgtccaccaccacgcctggctcatttttgtatttttagtagaaacagggtttcaccatgttggccaggctggtctcgaactcctgacttcaggtgatccacccacctcagcctcccaaagtgctgggattacaggcatgagccactgtgcccgtccaaaatttttgtaagtcaaaattttttgaatattggcagtttcctgtggtgcatcctaatattatactgagagtagtgatatgttggagataaggtcgtaagaacaggtaatacctaatctaaactgggagaataactactgttcaatcccactattgggccatagtagtcactgtttatataataaatgagtgaagtcttctgtgatgtcttttcgacacatgtattcagtgtgtattatgtatctagtagtctcccaatctcaaagcttctttgaagttgcatatcatatatttaaaatacatgtaaaatttgcagtttgctgcacaatagagccatagttgtcttagtacaaatatttttttcacatgtttaagtaaaacttgtccaaagagatatagcatatttgccttgtttttcccttttcttacacacagctctttgtacctcaggggtttgtcataccataatttgggatgcattgttatataaataggaggccactgaaagtttaaatcaaggtaatgccatggtgaaattgatgtttgagaaaagtaattctgagagagtcaaaatagttgtgttgtgatagcaactggcatatgtgcattaaaaattgaacattaagaataaatgctgacattgtggattatttgttgctttcataagtttgtcctctagcacttgtgctttttatcttttgtattaagtatgcattttaagagtaaatggtataccaccaaattgtctaacagtgctacatttttgtggaatcttgggggagggatcatatatagttaaaattttatattagattttcttttatagccatttacatgatgtggctttttatatttggaggacaaaagaattcatagaatacattaatgtgttacatgatgtcagcagataactagatttctaaaggttaagttattaaaggcttatatggaaatctaaaaagactcatgagtaattacttttaaaggcattgaaaggagtgaaaaagtgggtgactatctaattccagacatgaatatgagacagactagtacttatagcagtttggaggatgccagagaagccaaaaagggagcagcatatgcttccaaattgttttgaagtgaggctttgtcttttctctagaaaaatagataatatctcatcaacttaacatctagaggaccagagatattcactgaaaggaatgctttttattcattcaattattcattcatttattaaatattgaacactttaatgtgctgacactgaaatagtcctaacataacatatggttaatagaacagacgttgtctttgcatctatagtgctaatacactaatgggcagataataaatacaaaaaatatatatgactatatattataataaatgttatgaagggaaactacaagttacttcaagatttggtaacaaggaaatctattttagattagggtttcaagaatggtctctctgagtaagtgacatttaaagctgagatctaagagacgagtaggagaaatcacggtgatgagtaggggaagtgcatgcttgaggctcttgggtggcaggttctaaaagaaagccagactttctagaacacaagagcagttggccaagaggtaggtaggacccaaattataccagagcttggtggccatattgaggaggacatgggatttcattctaactgcaggaaaaagccattgaagatctttaagcatggaattggatggagtgacttaagtgtttcagagatgactatggctgttgtgaatgcattgaaggggataaggagaccagggaaaccagttaggagctactgctcgggtaagagttgatggtggttagttgaatgtatcagcaatgaacttgcaattgaaggtcaaagctaactttaaattaaactcttaagaatattattggtggtgtgtctcccaagaaaaatacctgtctaagaaaataggaaacatcatccccaaaagactaaatacgtagtgtgaaggttgagaaagaggaatatattgcagggaaacttttggtgaggtttatttgttgttgttgtttacttccaaaatatggtttccatttttctcccccataagttttctatttgggaaaagagatttagtggaattataaactgaaagaattcatgtataacttttgcctcactttactttttattttcatttttaatctttcatttttttccttctataactttcttgtctttgaaaaaaagagtgcaggtgccttatgtgtccaagaatgaaatagcctctgaagtactatctgtttgcttgctagcttgctggcttgctgggtcaaagaaaaggaagggctcgtttatactgtaacagtgtttttatttagcatgcctctgaggtttttattgtgttctgggacagtgtttatgacattggaagttaaagaaaagaattgcaatgagttggggggatgggggagggatagcactgggagatatacctaatgctaaatgacgagttaatgggtgcaacacaccaacatggcacatgtatacatatgtaacaaacctgcacattgtgcgcatgtaccctgaaacttaaagtataataataataaaattaaaaataaatatatttaaaacaaacaaacaaaagaattgcagtgagtttgagtgacacaaaaataaaattcccatgataattcaataccatgaattatctttattgagtgaaataaattctgagggtatagtaattattttatggtccttttgtattagatttgtgtttgcttaataatttagcactttgaattttctctttgaatttttattcttccagaaatctttgcggggttggagttttcatattgtgacttttgggctaacatctctctagctcttcttattagttaattttcagcagattttttttttctatattgcccagtccagtctcaaagtcctgggtttatgcaatcctctctccacagcctcccaagtgactcactgggattacaggtgtatgccaccatgcccagccttggaagactttttataaattagggtacatcttttttttttatttttcacataattttgtttttgttatcagcaaggttgaatcaaaagtaacttcctttcctggtggtctaattgctaggataaagagagggaaaaaaataacttcatcattactgaattatcaaaatgaggtcttttaatttatctattactattataaggctagttagaaaatttaagtcattttctaagagatagaaattttgttagcttgatttttctgactttttgtcattccttctcttatgtatggtgccatctgctgtttgtgggaagtattttatattttgaagcactacacataatagaaatacagtgtctaaaagaaaaatgtcaaaatacatgaaatgaaaaaagcagtagtgtggcccgtttgaaactttgtggcctgtggcttgtttctttttatgtaaaaattatttttatatctgattatttttagtacttacatgaatcacaagattttggtactcatcgtgttctgtcttaattttgtttttgctcagaatagaagtaatcggtaaacatttgttagttgactcatttggtttgttttttgtgactcctcaggcacctttcttgtaagcttctgcttacagtctatgcaaccttaggcaaataatttcagcccttagcacctctgtttccttctccataagaagaagataataatatcaatttcttaaggtttttctgaggattaaatgagataacacttgtcatatgcatagcacaatcctttcctttcgctaaaatgttgtttccaggttcagtgagtttcccttttaccttatttcaaagacacctttgttaagaatcagatttcattgctataggatcataaactctttgagccagaaggaacttcagtaagtgggcctcaaaatgttagcatgcatttgaatcatatggtgatcctatttaaatgctgattcggattttattggtggttataggatatggaacctcatagtctgcacatctaacttttacttaagcattgctgatactgcccccacagaatgccttttctgtagcaaagctttggaaaacaacaaacagaaaaacaactagtaaagatggagatggatgggaagaggatgactgaaaggtataaaattacaattagaaagaaagaacaagttctggtattctattgcatggtagggtgactatagtcaacaataagttattgtatatcttaaaatgacaagaataaaaggttctgtgtcttcacaccacaaaaaaatgacaaatgtttcaggtgatggatatgctgattagcctgattttaacattacacaatgtatatgttttgaaacatcacattgtaagcaataatatgcacaattattatgtgttacttaaaataaatttttttaaaaaacaaaagaaaaataatccaccaaaatctgattttcttttttgggtaatctcatgtgccagtcatcagaactgtatttctttgtagaagaggaaaggaatccagagtctgtctccagaagacattccagactaatttcttattctttactctcagcactaaattttattagtcagcagttacattttgtcatttctaccaatgttatacagcagtaacattgctgagagaaattattaaagagaattatattcaaaacccagttatttattgtccaagcattatgacctacaaatatttaattggtatccatttaaaattcaactacaacttttatttctatttgtaacttgttgccttgttctttactctttaaattgctttaaatttttacagcattaaaaaatgaaaagctaaacaaattagcaacttcagtaacgtttcaggttacaaaatcaatgtacaataatcagtaacatttgtatacaccagtaatgttcaagctcggagccaaataaagaatgcagtcccctttacaatagccacacacacaaaatgcctaggaatacatctaaccaaggaagtgaaagatctctacaaggagaaccacaaaatgctgctaaaagaaatcacagatgacacaaacaaatgaaaaaacatttcttgttcatggattggaagaatcggtatcattaatatggccatactgtgcaaagtaacctacagatacaatgctattcctatcaaactaccagtgtctttttttttttttttttttttgagatggagtctcactgtgttgcccaggctggagtgcggtggtgtgatctcagcttactgcaccctcccaggctggagtgcagtggtacgatctcggctcactgcaacctctgcctcccaggttcaagagattctcctgactcagcttcctgagtagctgggactacaggcgcaagccaccatgcccagttgattttttatttttagtagagacagggtttcaccacattggccaggttggtctcgagctcctgacctcaggtgatccaccctcctcagcctcccaaaatactgggattacaggagtgagccaccgtgcctggccaccagtgtcatttttgacagaactaaataaaactattcaaaaaattcgtatggacccaaaagagcccaaatagccaaagcaatccaaagcaaaaagaacaaagctggaggcgtcacattacctgtcttcaaatatactgtaaggctatatagtaatcaaaacaacgtggtactggtacaaaaatagacacatagaccaaaggaacagaatagagaacccagaaataaagatgcacacttacaactatctgatctttgacaaagtcgacaaaattcagcaatggagaaaggactccctattcaataaatgatgctgggatagttggcgagccatatgcaaaagaatgaaactggacccctacctgtcaccatatacaaaaattaactcaagaaggattaaagatttaaatgtgacatcacaaactataagaatcctagaagaaaatctaggaaacaccattctggacatcagccttgggaaagaatttatgactaagtcctcaaaagcaattgcaacaaaaacaaaaaattgacaagtggaacctaattaaagagcctctgcacagcaaaagaaattatcaacagagcagacaacctacagaatgggagatgatatttgcaaagcatgcatctgacaaaagtctaatacatagaatctataaggaacttaaacagttgaacaagcaaaaaacaaataaccccatttaaaaaatggacaaaggacacgaacagacacttctcaaaagaagacatacaagcagccaaaagacatgaaaaaatgctccatatcactaatcatcagagaaattcaaatcaaaaccacaatgagaccatctcacacccatcaacatggctattattaaaaagtaaaaataaataacagatgctggtgatgctgtggagaaaaggaaacacttatacactgttggtgggaatgtaaattcagttcagccactatggaaagagcttggcgatttctcaaagaacttaaaacagaactaccatttgacccagcaatcccattactggatgtatatttaaaagaaaacaaataaaaagacatacacttacatgttaattgcagcactatttgcaaaaacatggaatcaatccaggtgcctatcagtggtgaattggataaagaaaatatggtacacatataccacaggatactttgcagccacaaaaaagaacaaaatcatgtcgcttaaagcaacatggatgcagctggaggccattatcctaagtgaattaatacgagaacagaaagcccaatgcctcatatttgcacttgtaagtgggtgctaaacattgactactcagggacataaagatagcaacaatagacactggaacaactctagactaatagaggaggggaggaaaagggtgggaacaagggttgacaagctaactgttggatactatgctcagtacctgggtgatgggatcattcataccccaaacttcagcattatgcaatatagccatgtaaccgacctgcatatgtatcccctgaatctaaaataaaagtcggaaaaaaccccaaacaaattagccccaataactctctgtaaattctagagtaattacttgactccaataagacctttttttggtgagttggatatacaatgctattctcttgatgtttggattttccccgaaactggttaattatgtttaaaactgaatacccttaagtccagtgccccagtgtgggttcaacaggataaagtgtctatccacagtattctctgagaaggaatcctttagttttagccagagagtcatagagttgttcacacctgaggaatcatccagcttagttacacaagttcaaggtcctaaaggaaattaaaagaggcataaaatgacttctcagaaatgtatagattgactaaaaagtaaaaattgtggcctagaaaaaaaacttaatgagtagaaagttttttccaaatgaaatcttatgtataaggacaatactaccctttcttcctacctcccctgaagtgatggtaaggagtatcttgctattttatttttattttttgaaagagcatctcgctctgttgcccaggctggagtacagtggtgtgatctctgctcactgcaacctctgcctcctgggttcaagctattctcctgcctcagcttccccagtagctggtattacaggtacacaccagcatgcccacctgttttgtatttttattagagaaggggtttcaccatgttggccaggctggtctcgaactctgacctcaagagatctacccgcctcggcctcccaaagtgctgggaatacaagcgtgagccaccgcacccagccagtatcttgattttatctggtgtagcccagtgcattcacaagcattgctgtaagactacacaaatgtcatgaaagctactaggatttgtatggacaggttgcactatcatcctgtctggatacttgtcatgtttaagatttctagaaaaggaacttacccagtgtactttgataactttttcttgatttttaattcttttgcttttacatctgtgaaaaatagatcattataatacttttgaggtattttttttctagtggataatctgaatgcaaaatcaaccaacaaaagaaacaaacaaaaaaaccctgttataccctggaactccaacttgagaattttcttttccttgccattcctggcttccatcttcacagtcattcgtagactcaccctctctttaactttgcaagatctctggcaattattccagtcctaaaaggctagattctataggcatattctgtaaatgcttcttggttttcagactgtgtcatggtaatgctgttgccttccttgctacatcttctgagaactagaacttaaggacttccatgtctctgtacacttattcaatctgttcttattttaaaatcagaaaaaacaagggactatgtttctactatattcaaatcataaagaattatgggctgggcgtggtggttcacacctgtaatcccagcactttgggaggccaaggcagatggatcacaaggtcaagagattgagaccatcctggccaacatggtgaaaccctgtgtctattaaaagtacaaaaaattagctgggtgttgtggcgcgtgcctgtagtcccagcttgggaggctgaggcaggagaatcacttggacctggaaggtggaggttgcagtgagccgagattgcgccactgcattccagcctggcgacagagtgagaccccatcccccccaaaaaaaaaaaacatggattgttagacttgaaagtaactctacaggtagtttaagccaataccccttatttaaaagaagagaacttaagtatgacagtaaaagttgtaagaaccatgactgatctcaagcttaaagccggagcagatagtttagcttagcattagggcttaaagttaatactctaagtagattaggtaattctttaatagtagactgtggtatttggacctatgctacagaattctgtctagttttattttttagatgatttataagagtcttgaagatagtttataggtgaacaaacgaatttaaaattagtacgcatgagaacacatcaaaggaattaagaatatttccttaaaaaggataccttcaaaggcatcttcagtaacatgaaaaattcaaccaagtgttctctactctatttttttttaggatagtacaaaggaagtaaaggcataatatagtaaaaagaacagcagcagttaggtgtgaggcaaatccacacaatgaagctggtgaacactagaacaggagggatatttgccttcctggttattttcctcaaattctctgcttattatcaatatctgtttactgtggttgggatttagcatccaaaggcacgaatggatgcacttcccaagactctgtcctgtttagtgatatttcatggtctatttaataaactgtttgggggactttaacatgataattgtcagggcatatagtgcttaactgtgtgtcagacacttttctaagtgtttttttatatagtaactcatttaattctgaaaaaaaaaccctctgaggtatctataaggaaatcgaggtagagagagttaaaataactctaagtcatatagttaggaggagatgcaaagttgattcagacctaggaaggctggctccgagtctgtctcataaccaccatgctttattgcctctccaaaaaagaataaaaggaggaagcggtcagacttcaagggaaataaaatttcttttattttacctagatatctctagatccgataacagctgggaccaagatatggcaggctgcaggggtcaaggagagccagcaagcagtgaaacatctgcctccctctccagcttcatccctcacatgcactttcgtggtcccatccctcccagatcacaggcagttctgcctgcttcgtttctctctgcctttacagatgctatgcttttggtttgcactgctttcctcccaatactttaacttgaccaatttgtatttatttctctacctctttcaggcaaaactgctttgtaagcatctactgcattgtgaaacatttccaagtttacccaagaagtactgatctttctacctttgggctccccctgtcccctaaatatccctcctttttttgtactttcatcactcatttgacaactatttatttagcattactatgtgccaagcactattctggacactgaggaaatcagtcagtccaaatttctgacctaataaaacataatatctaagtggggaagaaaagcaagatttggaagagaaatgataggatttgatgtctcccttaaagggatcactccggctactgtcactctagagaaaaggagtcactctggagaataggctgtggggggtcaagagcaggagtgaggagaccaggaaactgttgtgttaatccagatcaggaggtgatgatggcttaggtaagggtgggagcagtgggaatggtaggaagtagttgaatttgggatatgtttaccaagtagatccaaaaagatttgctgatggtttaactgttcgttgtgagagaaagaaaggataattctatgattttttgcttatgcaactagaggaatgcacttaccattgaagaagagattggaggaagaacaggtttatggggaaaataaggaattcagatttttacatgtttttgattcctattaggacatccaagtagagatcttaagatagttgaatatatgattctggagttcagaggagatagtgaggctaaaacgttgatttgggagttattagtgtatgctatgtatttaaagccacaagacttgatggggtcacctagaaagctagctgacgaccaggtatgaccatagggaactcgggagatggtagtattcagagcaaaaggtagttcagtaaagctttcaaagccccagccaaagggatagaatttagagtcaggacctcattaaaaaaataaaaataaaaaggaactgaaaagagtgaaatgagatgcctgttctaaacaggcctggagatttgagcaagttctcaggacagcaactagaagaaggtaagaatccagaaccagaactcaattaggagacagaaacttggtcttaggagaaagtcagatgccatttattataaatgaggcacaagatcagagataggatctaatcaaacatatattgatgttcagcaccttgaatgttggattgtagaactctttacttttccactgggaccatgtgccagatcattctttatgccatgagtcaaccagagctggaggcatatcatgggttgaccttcgttcatcatgtccaatagaaatagaattatttaaaatacaaataatttttgcttatttatatgcctaaaattcttgcacctttcctactaattcttcagattgcattgagtcacacttatgcttatttagtcttttttttaagtgggaagtatgctcatttaatttgggaaattaggatctctctcttttttttttttttttttttttttaagatatggggtctcactttgttgcccaggctggagtacagtggcacaatcatagcttactgccgcctcaaattcctgggctccagcaatcctcctgcctcagcctctcaagtagctaggactataggcatgcaccaccacaccaaactaattttaaaaacatgtttgtttgttttttggtagagacagggtcttgccatcttgcccagactggtctcgaaatctgagttcaatcagtccttctgcctcagcctcccaaagtgctgggattacaggcgtgagccaccatgcccagccatcttatttttttataatccttctcattccttaagaaactgaaaggctggaagcttctcccttgaatagaaagcttcccagtttccagtcacctagataatagggtcaactcaattaaattaattcttaaagatgtataaacaggaaatcgtggtctttgcattgctgtaaagaaatacctgagaccggggctgggcgtggtggctcacacctgtaatcccagcacttttggagcccaaggcaggagaatcacttgaacctgggaggcagaggttgcagtgagctgagatcacgccattgcactccggcctgggcaacaagagcaaaactccatctcaaaaaaaaaaaaaaaaaaaaaaaaaaaaagaaatacctgagactggataatttataaagaaaagagttttgattggcttgtgattctacaggctgtacaagcatgactccagcatctgcttctggtgagggccacaggaaagtttcaatcatagtggaaggtgaagaggagcagcatattatatggcaagggaatggggagataccacactcttttaagcaacaagatctcatgtgaaccaccagagccagaattcactcatcaccaaggggatggagctaagcccattcatgagggatacacctccatgatccaaacaccttccaccaggcttcacctccaacattggggattacacttcaacatgagatttggcgaggatgaatatccagcccatgtcattctacccctggcctctcaaaccctcaaatctcatgtccttctcacactgtaaaatccaaccggcccttctcaatagttgcctcaagtcttattccaacattaactcaaaagtcccaagtccaaagcctcatctggagatgagatccttctacctgtaagtctatgaggttaaatacaagttaaccattcccagttacaatggtggtacaggcactgggtaaacattcccattccaaaaggaagaaattggccaaaagaaaagggtaacaggccccatgcagttctgaaacccagcagggcagacattaaaccttaaagctcctaaataatccttgtttccatgtcccacaccctgggcacactggtgcaagtggtaggctcccaaggccttgggcagctctgcccctgtggctttgcagggtacagcccacatgactgctctcactagatggaatgcctgtggcttttccaggctgaggattcaagctgcccatggcgctaccatactgtggtctgaagggaaacagcctctttcctgcagcttcactaggcagtgccctggtggaggactctgtgtgggggctccagccccacatttttcctccacactgccctagtagaggttctctgtgcaggcgctgcccctgtggcagtcttctgcctgggcactgaggctttttcatacatgtcctgaaatctaggggaaatctgccaagcatccttcatgcttgcattctgtgtacctgcagacttaacatgacatggaagctgccaaggcttatggcttgcaccctctggagcagcagcctgaactgtacctgggcactttgagccatgactggagccagaacagctgggatgtgggaagcaatgttctgagactgaccaggacaatggggccccgggcctggcccctgaagccattctttcttcctaggcctctcttcctatgatgggaggggctgtctccaagatctctgaaataccttcaaggccttttgcccattgtcgtggatattagcacttggctcccttttagttatgctactctctttagcaagtagttgctccatagcctgcttgaattcctctcctgtaaatgctttttcatgctctgccacatgattagactgcaaactttccaaacttctttgttctgcttcccttttaaatataggttccagttttaagtcatttccttactcccatatttgattgtaggttgttagaagcagccatactacctctagaacactttgctgcttagaaaatttttccaccagataccctgttatcattaagttcaaacttccacaaatccctaggactcagacacgatgcagccaagttatttggtagggaataacaagggtgacctttgctccagttcctaataaattcctcattttcatctgagacatcctcagcctggccttcactgtccatatttctatcagcattgtggccacaatcacctaacaagtctctaagaagttccaaactttcccacatcttcctttctttctctgagccctccaaactcttccaacctctacctgttacccaattccaaagctgcttcccacatcttcaggtattaatagcaacccctcactccttggtaccaatttttatgttacaccatttttgcacatctgtaaagaaacacctgagactttgtgtaattttcaaagaaaggggtttaatttggcccatgtttctgcaagctgtacaggcatggcaccaacatctgttcaactcctggtgagaacctcaggaagcttacaatcatggcagaaggtgaaggagaaccagcatatcacatggaaagagcgggaccaagagagagatgggggatgtgccacacacttttaaacaaccagatcttgtgtgaactaccagagccagaattcactcatcaccaaggggaaggtgctaaggcattcatgagggaaccacctccatgatccagacacctcccaccaggtccccccttcaatgttggggataacattttgacataagatttggaagggacagaaatccccaccatgtttggtggcatcatgggctgacattaatacatctctttaatgggattggaagttaggagatgtttcaaggaggagattaccttgaactgagctgtcctggtcagttggccatctgagagaaagaaatggggtccctgccacaaggcgcctgggaaattaaatcccagttagagaaataggaagacactcaggaagtaatcagaaagacacttcactggttatttccccccagcagttttgctgcgatgaatttcaggggtagaagcaggaatggtggaataaggaattggaattcaggcctacttgtataaggccctcctcagttgacctataccagtatttctacatttttcttatttgacttctcttaccttgtaaaatatatagaaatcagtggtttctagggtctgcagagtggggtgggtggcactaaaatacagtagatgttaatacccgtcttagacttaatgaatcagaattatccagggtgggatccaggaatctgaacttttaacaaatctcttttgttattcttaactggtactcctcaatttactgtttaggaatcttacacatgggggaggttgagacacttaactaagctagttggtggcagaaatgaaactgtgatatggatcttctaactcctgctctaaagcttttgatttatagtatagtattaatgaacttctattgtgaacttgcagaccgtttaatattaggttcaatatactatgtttaaatgggaatgaatttcacagggcttatagagcctttccccataattgtaaaatttttgcagcaaccgctatattactgttgctacaattttctttgctaattaggtctctttgccttgtagctctcacttttaaattgtttttgttttgtcatttagtagatctcagagcaattaactaaactaattcttccatctttttttaaatggagacatctcctcctcactatggcaggaagatctgtgatttctagtataactgcttgatgtgaggacagggttacttgggaaagaactttcagcatgagtgatttaattatctgcctccattagataggtacctttctcttgcttggctcctaataaaggaacaagcactctcatccattttacggtttaaataaattttacagttaaatatgactagatatacttttagtacccaaagttgtggatattttgttccataaaagctaattactaatagaaaatggtttgctagataaattacttaactgaaaatatactagaagcttatttgtgctttctaaaaaagttgataattatgattcactggttagaagttgtagattttacatatccctgatgtatagatggataagtgcaaataggaaaactatgctcttaaattatcatgattgcttgaaaacttggtaatgctcagttctcagtctggtttcatactagaaactcctggaagttcttaaaaatacaagtgaccacattctactcctgagaaatttctatttatttgacctaagatggatctcctgcctctgtgtgttatgaaagctccccaggtgattttaataagcagccatggttgagagccaatggtctaatggaaagagaactgaattataatcaggaaacttgtcattccagtcttaattctgtgaactcaggtaaatcatctaacatatttaagcttgcattgtaaaatggaggtaattaataatggcctatatgccggattaatatttttacagttgaatgaaactatatactcaaaagtgctttgcagtaaagtgttatacagatggtggcatagcaattaagatttactacgcaatatactactgtgaagtggtatgtttagtcttttgtacttcttggcagaaagatgctagatcccctgtggcagaaagaaacttaggctccttagcgatcctcagggtatattattatgattcttaaagttcactctgtatttttatgtgtaccaggctgctagtgtctctaggtgatagggggaaaaggtagaggaaagggtggagttgctcctgctggtgattttttaaaattgtgagttcctataattagtaacatccttcttacatcttcatagagacatggttggtagcagtggagtcgtttatataactttacaaaccctctcttgtgtactctttttcaatgttattctcttaaatcacttctgtctctgctttccctagtgtttaagcttcactaacatttacctatatataaatggatgaggacagaagagaaagggtccccaaagatgaatacactcattactggtttcccaacatgatataaacctaggacttcaccccttggagggatgaaagtttactatgcatagcatttcctggtgtgtcagtctcggtacagcctcttgctcaattcatcagctgtttccaggcaaaattacataccacttcttgagtgttttaaagcctcctaactgtatatatgtgagttctttgatatattgacttctttttctttgagtcgattcccagtagtggcattgctggatcaaatggtaattatatttttatttttttgagaaatctccatactgttttccatagtggctgtactagtttacattcccaccaacagtgtatatgagttcccttttctccactttcttgtcaacatctgtcttttttaataatagggattctggctgaggtatgctatctcattgtggttttgatttgcatttctctgatgattcatgaggttgaacattttttcatatacctgttggctgtttgtatttatttttttgagaaatggctattcatatactttgcccaagtatgaatgggattatttgtttttttcctgttgagttgagttccttatctgttctatatattagttcctgttggataaataatttgcaaatattttatcccattctgcaggttgtctcttcactctgttgatttttttgttttgtttttttttttttgtgtgtgggagctttttagtttaattaattcccaatcacttatttttggttttgttgcctgatcttttgaggcctttgtaacaaattctttgcctaaaccaacaaccaggagagggttccctagattttttcttctaatatttctatagtatcaggttttacttttaagtctttaatctactttgagttcatttttgtatatggtgagataatggtccagttacattcttctgcatggctatacaattttcccagcaccgtttattgaagagattgtcctttccccagtgtaagtttttgttgtttgtttttgtgtttttttgagacagagtcttgccttgtcacccaggctggagtgcagtggcatgatcactgctcactgtggcctcaacctcatgggcccagatgatccccctgcctcaccctcccaagtagctcagactacaggcatttgctgccacacctgactggtgttttattttttgtagagatggggtctcactctgttgcctaggctggttttgaactcctgggttcaagcaatcctcctgcctcagccttccaaagtgttgggattacaggtgtgagccactgtacccggcccccagtataaattcttgttggctttgttgaagatcagttggctgtaactatgtgtctttatttctgagttctctgttttgttctactggtctatgtggctacttttataccatgttgtggcatttttaaggattttttttttaagtggggagtttgagaccagcctgggcaacatggcaaaagcctatttctacaaaaaaaaaaaaaaaaaaaaaaaaagtagaaaaattagccaggcatggtggcatgcgcctatagacccagctacttgggaggctgaggtgggaggattgcttgagcctggaaggttgaggctgtggtgagccatgatagcactactatgctccagcctgggtgacagagcaagaccctgtctcaaaaaaaaaagaagaagaagaagaggaagaggagggggaggggggaggaggaggaaagaagaagaagaggaggagggggagggggaggaggaagaaagaagaagaggaagaggagagggagggggaggaggaggaaagaagaagaagaggaggagggggagggggaggaggaggaaagaagaagaagaaagaaaagggggccagatgcggtggctcagcttgtaatcccagcactttaggaggccaaggcaggtggatcacttgaggtcaggagttcgagaccagcctaactaatgtggtgaaacccatctctactaaaaatacaaaaattagttgagtgtagtggcgcacacctgtaatcccagctactcgggaggctgaggcaggagatttgcttaagcccaggaggcggaggttgcagtgagctgagatcgcgccactgcactccagcctaagcgacagagcaagacttcatttcaaagaaaaaggaagaaagaaaagtggtatgagcacaagaactctaacaaaagatttctggatggattgggttaatggaaaactggcagaagcctggaggaaggagaaggtcaagatcagctaatagtagctgataagaagtcctgtatcattatgaagagtatcaaaagcacccctgcagcctgggatggttgactgataactataactgtaaaacaatataatccgatgtgtatcatgacttaagagaatttgagaagaacagaaaggtgaatgccagtattcaatggccaatggaacatgtgtttagggactttatagcaatacttcagtgctctaatgttcaggtcatacctccctatcattccctaggtggtgtgttatctgtttatatttttatctgctatcctaatctgggagtcctctgagtgtagggatgacttatccatctttgtaaatgtcctcaaaatgcttgacatatgatgaatatgttaccacaacaccaggggttcagtctaggtcctgctgctcacagcacagaaagccaatgactaagatgatgattattgccaaggaagaaggctttaattgggggctgcagcagacgagatgagatgggagctcagtctcaaatccatctccctgacaaactgaaactagggacttatatagcagggaagagatatagcaatatgtaagaaacaggaactagagaggggtaaggaagcaattatggtgaatgaggggccctcatctcattatctggatatggtgatctggtgagttccagttcttccatacttttttttgagagacctgaaggtcctttgttgagtaaggaatccgataaaacaaatgttaaggttcaagcttcaagaccaaaaacgtcaatttctatgtttatccaaaaaactatctattgaactattgggtcagtttgaaacacatgttaaaacctctaatttgatttccttatctcattttgcctgccttgtttctgaaagttttatctaattcagatgtcacaaacctctaaaaatttctttccttgttcaacaaaccccctatgtcacaagtttacctgcataacaaacctgaacatatacctttgaacctaaaataaaagtttaaaataaatgaataaataaataaataatagcaaaactatgtttttttaaaaaaaattcttctcagagtcacctatgataaagacttctagattttgtagatattttactacttaatctgtacaaacaagtgtaaaccaagaaaatattttaaaattactcatgactaaacagatgcattcatgttaaacttatctctcatccctacccattcttgaactctttctcattcactagtcatttatgaaaaaactgtataacaaataactataataaaatggaaaatatataattaagctagaggaaaggaagggtgggagtcatcctttttttttggtatatgttagtaaattaatagtaaaaataagggaggacttagccataagggttttaaaacagcatgtctcaatttgtatacaaggctactatgttggtctgtgaaatacgtaaaaaaaaaaaaaaaaaaaaaaaaaaagcgattgattttcagtgctgcaatcctgacctctagtggacattcagaacaaaacccaaacatcacattcttttatttagttactccatcaagcaccattagccaacctaaaatattaaactttcaaagagattaaaacatgagaagcagaataaagtaaaagaatttttggctaatattctaaatattcttgctgtagaacctgtatttaagagcagctagtattaacttatttctttttgcgtgttaattatctgtcactttcactactttctttgaaacaatgcattgctttatagatcatagcagcaagaaatttatcagagaagccaaatggattttcttttgattacctgtaatatataacaagctatacgaaaactgagtggctttaaaaggacaatgatttttatagtgagacatatagtgatgttatgtaacctcctgatagaatgcactgagaagggcacagcatcacttctgtggtatttgtgcccaaaatacatattctgaatttaatcataaggaaccagtagacatatcgagttgagggacattttataaaataactggccaatactcttccaaagcatcaaggtcatgaaaaataaacactgaaaacggtcccatatgaaaggagactaaggagacatgacaaccaaattcaatatataatccagaattgcatcctggaccagaaaaagggcattagtggagcatttgataaaaataatagtttcttggttttgatcattatactatggttatgtaagatgttaatgtttgggtaaaactgagtgaaggatatgtaggacttcttggtactgtttttgcaaagtttttctaaatccgaaattatttccaagtgaaaaaaagtaattaaaaccaatcatttattttcttacaatctcatgagtcagaaattttggaattcaactgtgtggttcatctctgatccacttggcatcagctggaccacctgattcacttccagatgacttctttactcacatatctaccactttggtgattcttggtctttcttctttactgatgaaatctggttctccaggccttcttttgattgcttggttccttagagagcatgggagtataagtataattgcacttcttatatggtagctggcttcgaaaagtgagtgctccaagggactgaacatgaaagctgtcaatatctgaaggcctgggcacataaactagcatggcatcacttccaccatattctactggtaaaagcagtaccatagtctgcccaggttgaaatgagagaacagagaccttaactctcaatggagaagcatcaaataattgtgactctttaatccatcacagatatctaacaaaagtctcactgagttggcactcaagatggaattagtggaaaaaagcctggatttgctttagtctgatagacctgagttatagcctggctttaccatttactaacagtgttctgtctctgagcttcagtttagccatctctaaaatggtggcaataatacatatgccatagagctgttgagaggattaagtgaaaaatataaaatactggatataatgggcaataaatacatgaacctaataataataattgctagtgtttatcgaatatttaccaaatactcagttcacttgatgtatgctatctcatttagtcattatctcttcctagggtggtatgttttcttttgtatgggtcagaaaggacagaaccccatttcctctagctttgtctgtgaacctgctccatttactttggccatttttggtttgataatttggtaatttggtttattgacttgttgttaggatttccattatttcccttttattttgattcctaagaacccaggtgctgatgcacacttggtactttttgacactaccttttcagcatttgttctcagtgctgtcagcttaagtttttgacagcttctcacacaatctgtcagctctctctgaacccacgattgcctgcttatcagagccagaatgttcagtgtctttgtttcagtgagtgctctactgtcagctgttattttatgcaagattgtgggtgcttaatccttggcctacccaagaacatcatgatctgcactttggagcaattattcaatttggggcaattacttgtaggtgttctttaaagcaaagatgatgccagaatgtaattgaattttgaaatagcagtatccaaatcagttaaaaagctacttcgtcatgcatgcaaggctgatctcaatctgttgtcattagaggaaggtggtgaccctttcttcccacagcaagttgggtttttgttgcctcatatactgcaagcagtcagctactttttttgagtgttttcaatatggaaacaaataatagaatttagttctggtagaagtcacttatttgttatctttttactctctgctctcaaaatttacttgcctttaaatggaaagaatcactttaatcctttaggaagtagaggacacattaaataatatccaaataagagatttattcattcattcacatattcattgaatcatcttctctaacttaattgtttagagtatcacttttggaattaggttaaaatcctagatctgcacttattagctattggacttaggaaagttactttgatttctctaaatcttgatttccttgtgtataaaatggaattttaggtggttgtgggatgaaatagggacatgcctttaatgtaattaattcatatcttggcacatacaaaatactcagtagatgttggttattattttgcatttggagttagaccttgtactataaatgataagtggccataatatgtttacttattttttactcttaataattctccaaacctttgactcctactacgtacatgttttccccttaagaacaaacaaattgctggggattacatattcctaaaaatgggaggcatcttgaaaatgtatgagatattttgcttttaaaaatacatttcaaggctgagtgtattgtctcatgcctgtaatcccagcatgttgtgaggccaaggcagaaggatcacttgagcccaggaattggagaccagcttgggcaacatagggatacctcatctctacgaaaaaattaaaaattagccagatatggtggcacacacatgtagtcccagctacttggaagctgagttgagaggattgcttgagcctgggaggttgaggctgcagtgagtggtgatcacaccactgcactccagcttgtgtgacagagtgaaattctatctctaaaaaaaaaaaaaaaaaaaaaaaacctgatagaataacaagttcttttctgaattccatcaactcaaatgtcttaaagtgtatttgtttgcatcgtctagccactctgttctactttagttcaaggcttatgaagtctttatttttatgggtaatgtctagagcttcatataagcagatatagtaataccttatttttctgaacttgtttaaagaatttacatacataaatttttctggtaactgaaagtttcctctttagcttcccaaacttcaaaacatcattatctactttttatttaaaacacacactcacctcccttcttaagcacagtattataacatgatataagcattcatcaatcctgctggattatcattattaataatgacaattaacagtagttaataattaactattgaagattattggctcccccaagtggacccagagagctatgcattttatctttttttttttttaatatatgtcttcatttctgtgagatctaatattttaattctgacaactgtctctataagctatctatccctgaccccatctggcacatactttatcttgtagtttgctacttgtaatatctataagcttcaaaatcatatcaccaaactaactggaagtatgtatagaataaaaagtttagcaaagtttcctcttggtgtttgtgagagctattttggctatttagagatctttatttacttaatttttacttgtaagttctttgtgtcttggacagcttggttgtctaattgtttgattttgagataattgaagaaaggggttcttactgtaatttgatgataattctgtaaattggtctagttgggtccacagggaaataatcaacccccgaaaatttgggaaagctagtgtagtttaatcattcagtcttcaaataagcatttactatgcacattataccagcactgtgtgagaatatctcacacaggaggcttgagggggtgattctagcctgttactaaacacatatgtaaaccaaaaacatctgagatgggtttcaatcaatttagaggtttattttgccaagttacagaccatgatccatgacacagcctcaggaggtcctgagaacatgtgcccaaggtgattgggtttcagattggttttatatgttttagggaaacataagacattaatccatggccgagcacagtggctcatgcccttaatcttagcactttgggaggctgaggcaggagggttgcttgaggccaggagttcaagaatagcttgggcaatatagtgaaaccctctctaccaaaaaaaaagaaaaaaaaattatctgggcgtggtggcatatgcctgtagttccagctacttgggaggctgatgtggaaagattgcttgagttcaaaaggtcaaggctgcagtgagctctgatggtgccactgcactccagtctgggtgacagaacgagactctgttcttaaaaaaaaaaaagacatcagtccgggtgcgctggctcacacatgtaatcccggcactttgggaggccaagacgggcagatcacttgaggtcaaaagtttgagactagcctggccaaaatggtgaaaccccgcctctactaaaaatacaaaagttagccaggtgtggtggcagagcctgtagccccagctacatgggaggctgaggcacaagaatcgcctgaacccaggaagtggaggttgcagtgagccaagattgcaccactgcactctagcctgggcgacagagcaagactctgtctcaaaaaaaaaaaaaagaaaaaagaaaagacatcagtcaatacatgtgatgtgaagcatacattcattcagtgcagcaataattcagagatggggcttccaggtcataggtggattcaaaaatgttatctttttttttttctgttcttttctttctttctttttgtttgttttttgagacagggtctcgctgtgtcatctaggctggagtgcaatggtgtgatcttggcttactgcagctcaacctcctcagttcaagcactcctcctgcctcagcctcccatgaagctgggaccacaggtgtgtaccaccacacctggctaattttttttttactttcttgtagagatggggtctcactttgttgcccaggttggcaaagatttcctgattggcaattggttgaaagagttgttattatctaaaaacctggaatcaacagaaaggagtgtctgggttaagataagggcttgtaaagactagagttcttattatgtatatgaagtcttatgggtaaccactcccagaggcaataaatggcaaatgtttcctttagacatcctaaaaaggttctagactctcagccaatctcttcaggatcagaaagtgacctggaaagagaagggaatcctctatagaaagtaaattttccccacaagagacaactttgtaggaccatttcaaaatatgttcaaggaatctttattttattttattttttttgagatggagtctcgctctgtcacccaggctggagtgcgatctcggctcattgcaagctccgcctcctgggttcacaccattctcctgcttcggcctcccaagtagctgggactacaggcgcctgccaccacgcccggctaattttttgtatttttagtagagactgggtttcaccatgttagccaggatggtctcgatctcctgacctcgtgatccgcctgcctcggtctcccaaagtgcttttgggataaaatagtttggtttctttcagggccctgctatctgctatgtgatgctatacttagaatcacgttggaatttggtatcttattgctacagggtgtttgctgtctgtcttaggatctctcttttaatgttaatgctggtcagttgtgtgcctgaactccaaagggaggagagtataatgaggcatgcctgattgccccttcctgtcgtgatctgaactatttttttcaggtttagctgggtccctttggtcccagcttagtcagttggagggcttagaattgtctttttggttttcacaggtataatattgggctagtcacattcatactctaagaaatgagaatcattgtataggttgttataacaatcaatgaaatttcacaattcctgtgaatgtaaggaatttggggggaatgtttgacagggaggttaagaatacagccaaggtagctgaacatggagtggagtttccaaaggctaccatgaaaggatttggaaaggaaaggaggagtagcaaactagcttaggataaaggaccagagcattatgaagatgagaaaactagacatgagagggatttgcattttgagcagtgactggaaaaacaagaaccagagaaatagtggatcaggttctgatggcaagctgataaacactcaggttgtgagaattcactgttgcctagtggttgtgatgtggtggtggacagagttggagaacagggcagtaggtcttttttatattggcctttaagttttggcaggtgggcagcagctagtgggtgagaagtcaaattttgattcagaaagcaaattttgcttaattgtaacccacattttaaaatctgtaatagtcttttttttctaattggtaaattgtggtcaaaaccagtccaggataattgcttagtatggtaatgaactgtgttcatttgtttttatctcctggcctgattatacttatttcctattgcttttggtttcttaaataatcagctgagtaaaccccaaaccaaaaatatttggtttatattttaaccaactgaatatttgtgtttatcattcattccttccatcattatgttatatttctggtacctgaatgtgaaagtttatgttagcaaatcataacaggaatacactctaaatatctgggcctaatccttgcttctggagttatttcagagacagaagaagcatggtttattataagttttttggatagcacatttggtatagctccatatccaaaagccagccagaatgtatcagtgaccaagatgaagagggcacatcaaatagaccctggacttatgggacttatgccaactcatacttgaaatatcttttttcttatgtatgatgacttgcatggcaaggaaacagcacattttgtagcaaacatttctgattgttacctttatcatataagattctctatcttttgaatttaataactcaatgtctcttcagagcaattgggcagaacccagagttcaaaattcagttctagaatagcttcttaaggaacaatttaatttgtttatttctaaagaaatattgctatggttttcagaaaaggaaaggaagtctggcagatagcccctaatgaccacctctagttatacaaataatacttgaaagcaattgctaaaacaaataagaaaacaataagaactgtagtggaaatgcagtgtgatacttaaagcctccagtacacaatctgtcccacttatcagcaacactgccttgtttttttttattttattctgtctgccacttgcagtttaactgtaacaccgagatgtccagattagggttaggaatttcaattaataattttagacttctgcatcattatgccagcttgagcaaggaacttgactttcacaagacttaggcacatgcaaataatccagaaattgactgaagggaaataacttattgtaaaaacaattttatgtgaacattgattaaatagcacctaaaatttataacaagccactcagggaaagaaaatacctttaaaaaaaaactcatggtttaattattgtttgtgaagatgaaagcaattaggaattttattaaatatatgtggaagtcttggggaaataataaaatagtgatacatgtggcagtactaatcttcactttctttttctatttcagggtttgaacataatctttcatgtagctttggctctcctaaaggtaagtcttttttttaatcttaagttaccacattctcttacctctttgcccttggaactggaataattcaatttacagtctttgactcatttcagtttctcagacacacaaaaatagatgacttctctgagaaactctgatcctcttccctcctctcatctttttctgttgttgtttatttggagtcttttttttcttataatccatttatttaatggtactatcatagagctctttccagtaacataaaatatctttttatcatatgaattggatgatataagagaaaaggttaaaaattgttttctgtcaaaatgatgcctgcttttttcttaaaacactttttactataacatctctggaggtacctaaacatataattgaattattaaaaagtttttataatatactgactaaaaaagaaactgctacatttcaatttgcagttctttccatgatagttagaaatttataaaacactttagaattctattgtaattaccttgttggattttatgtcaacatatcatacagctttaataatgtggtaactgcaaggcatttgctgcagagttgatgaagataacccagctggtttttgtccttcagtcagagaagacattctgatattaaaggcaataattgcctcaaaggcacaggcttaccctttcctcagtataacatggtggttaaaatggcagacctggactcagacagatttgcttctaatttcagccctaccatatgaccttaggcaaatttttctaagtgctcaaagtctgggttttgagataataataggaattaatttatgggattgttaaaagaattgagatgatcaaagaagtccttagtatagtatctagaacattttactgcctagtaaagttagctgtcattattattgttctttacaaggtgactcagaatgtgttcttagatcccttatcattcttctgaatctctcaaaagataatgatgtggtatcataggaggacctcttgatacgttaggagagccttaaccatacctaaccattaacataaccttgattctaaacaaaggcatgaaatagtacaggccctctgcaactcagtaagtggatttctattcctcatctcttattcctttacacatttgctctttgtgaagttcataagatacactttttaaaattaaatcgattgtgtttatatattttttatgccaaagctatttagaaaatagaaaaatattttaaataaaataacacaaacatatttgctgtgtcccttaatgaagtcatgggttttgacctctaatttttttctttcattaaaacaaatccaagctgaaactttccaacatgtcctctcaacagggctggaataagacttttagaatgcctaagcattgaaagtatatgtaatacagactaaaaaaatattaaaacataaagtaagtataaggaggtccaagaaagttctgatttctcatattatatctaatgttttaaactctcagatattatgtctttcctaaaatgcctttcctcatttttttggtgacttatctttactagtgctttcactgaatgcttaatctgtcttttgagtaacccaggactacctctctggatatcagacctataccctgtgtcaacttaatactatatacattagtaaattatcttcttgattgacatgttgacttgttcatattattttcatttattttgtccatgttaacacagacaaggcctctacagaggacatactctggccactgggcaggaaggctttgtctgtcttctttagcaatacatgggcactcttgtagcatcatcttagagaattttactagttagagaagataaaaagagccttctcaccactagtgccctatatttatgtaacttccttatatgaatcctgaagctgacccccccaatagacagagtatatatgggactaaactgaagtgtactttaatgatctattgccaccacttggaaaaaaagaatacgcaaacatatatgacagtcactgactttcagcttctagtgtagtataccagataaaataatatgtatttgtttatatcaaaattaaaaactttggagaagttcaaattgctgggtttttttttcttttgttttgttttgttttttgctttttgagacagggtcttattctgctcactctgttgcctaggctggagtatagtggcgtggtgatagcttactgcagcctcaaattcctgggctcaagtgatcctccctcctcagcctcttgaggagctagaattacaggtagatgccaccatgcccagctaattttaaaaatattgtagagacaggggtctcactatgttgctcaggctggtctcaaactcctggactcaagcagtcctcctgccttggcctcccaaagcactgggattataggtgtgagccaatgagcctggccttcaaagtgcttatgaattgagcctaaggaattttcagtatagctacagagagacttcagatttctctgtattataagcatttcttgtgatgaggggacagaactaacatttcttgaacatttatactctgtgttaagtactaacagattatctcattaacatacattaaatgtctaggatttatttgtagaatagtaatggtattagccagagaaaacatctaattcttcccccagcccctagttgataattgagagatcaaagctcaagatcaccttaagacttttgtctcagtagtgggaaagttggatttataatttttttgaatgggatagatataggatgaattctgtgttgctcagttaggttttaaagacacctactttctgaacgggaccaacttctttttggttagtaatagcctatcaggtagctaaaaagctatggacctaaaagaatgattcacaatactaggcagcatcatgaaatcattttgtgtccagtaggtaggtcagatatattcctccaaatgtaatttatttacttatatgaaacattaggtagtcatagaatacattcaatagatttaatagactggagatgatcagtcagaattgttcttagcacttcatgttgggcacagaaatttttcagtcagaataggttttttgtttgctgtccgtggttaaaagcaaatgacagagtgtttttctctggccttcccaaagtattatatgcttatttcgtgtcctacatgtgtatgcagacactacagagataaagaaagcccaatcataatcctgttcccagggatgaccataataaaaacttggtataaaacctttatcccatgctttggcctatggttatataagtatgcattacctacctatacacatatgtatatatgtatgtatgtatatttttaatctgagtttgagataagatgggaaagtgggaggaaatccagaagaacagtgtgaaaggatgcacataaatttattttctttcaaaaaatgctgttgaacaatactctttttcattcagtatatcgtgaatatctttccatgtcactaaacacatgtaagggttaaaagcatgtggacattggagtcagactacttaaattcagattcattcaaaacaatttatccaatggtcttaggtaaattacaatttctccattttttaaatgggggaatattagtaataccagtctcataagattgttgtcagagtttaatgagttaatatatgattgatgcctagaactcagtactacagtgtactgaggtgctattgttagagacagaatttctcttttgactggtttttatcctactgtatgtgccataatttattttgaggcagagtctggttctgttgcccaggctgcagagcggtggcacaatcttggctcactgcaacctccgcctcctggggtgcaagtgattctcctgcctcagcctcctgagtggctgggattacaagtgcaagccaccaagccctgctaaattttgtatttttagtagagacggggtttcaccatgttggccaggctggtctcgaactcctaacctcaggtgatccacctgcctcagcctcccaaagtgttgggattacaggcatgagccaccgcaccctgccctgtaccatatatatatatatttttttttgaaagccactgactttattgatctaaaaaactttacaaggacagtgacttttctgccaaaaaaggagccaaatggtatcaaacggactgaaattgagggtgggggtgagggatggggccaggaatccattcaggaaagctggtgactgtccccagggaagtagcaggggaaaaaggaaggcggaggcatgcaagagtgagaatccaaaaaagttaaaatgattaggagagaaaactcccaaaagaccctggagtacattggaggtgagtaggacaatagcagtcttttcctttgttgaggacaggggaggagtccctactcggttgcaaactccggatgagggctggggattgagggcttcccagaaagcatcacaagaaggtgtcacaccactctcgaaggcatctgaagcagtcctgggactgcttggcattggcaccaccagtgtccctcagccattctcagaagaggtcttcatctttctttagcaccagaaactggccaaggacaacataggccttgtcaaagcacccttcctccagcttcttgtccataacttcaccaatcccggccaggctccctactggcttttcccccacggactctgccacaaagtctcggtgcttttgggaggttgtaatcttgttcaggtttaattgtcagcttcagttcccataatggttcctcctgccacctggctgctcctgcctatacctcaagccactagaactttcccctgtaccacaatttatttaaccaattttatatttagtttttatggacatttgtttccagaatttcctgttaaataaaaccgtaacaaatatccttaaacttgcatctttgcatacttatctgatatctctggggtaaatttctagagatggaattgctaggtcaaactgtaaccaaattttaattttggatacatattacaaaattcttctctgctagcaatgtgagagtacattttcccatactcttcaaaaatttctaaacattaagcacctttatggaaatcaaaagcaagttataaatataaatataatatataaatatataaatttatttatacataaatataataaatataaatgtaaaacaaagcaatttaaaagtaatgatttagtaattttttattactaaatcatataaataaagctcttcagccagctttgaagactccagtattttcttttttggggagaatatccagtttctttagggaagcagtggatcatggctaaattctagaagactggaccttctcttagtttggaggggcttatataaaagttctgacactttagggggccaaggtgggtgaattaggtcaagggttcgagaccagcctggccaacatgacgaaaccccgtctctactaaaaatacaaaaaacgccaggcgtggtggtgggcacctgtaatcccagctacttgggaggctgaggcacaagaatcgcttgaacccgggaggcagagtttgcagtgagccaagattgcaccattgcactccagcctgagtgacagagcgagactccatctcaaaaaaaaaaaaaaaagagttctgaagtgtatctttgatgtttttggcttttcagccctttccagtatggtttttccttaccattccattgaagcttttttagtatcttacttgatccttcaacagttgtcaaaacagcataatgacatacacaacgcttccttttttttccccttctttttttatgttttggaaacatcttcccttggtttctgtcctttcttttatctccccctctgctacttctgtctttttttttcctcactcctttttccccctagccattagcttggagttctacagatctccagcctctaggaatttgcttattgcttctcccttgttgatcttattcattcccctggtttcatctataaatgtttactctcatttatttttattttttttaatccctcaccgccctcccaccctttccccttctgagtctccaatgtccattttctactttgtatgcttttgcatacccatagcttagctctcacttagtgagaacatttggtatttggttttccattcctgagttacttcacttaggataatggcctcctctttcaagtttctacaaaagacattatttcattcttttttatggctgagtagtattccatggtgtatatattaatatatcacattttctcatctactcctcaggtgatgggcacttaggttgatgtttactctcatttatatttaatccaaacccacatatttggctgtggactgaacatgtcggcttggatgtttcacaggcacatcaaaagtcaaaactgaaataatgtgccctcccaaatgtacttttcatctagtaacctccacttcagtaaggactctacccagctgctcaaaccagaaacctagaagttatccttaactctcttctcaatatcccatatcagttcagtcaccaagtcctgtggattctacttcttgaaaatttttagaatcttcccacttttctcctattcttacttaggtagcttttaggccaccaaattttccaggaagatgatgccctcctggattattgcaggacctcctgtaataataaatattggatacctatgaagtgccaggtactgttctagacattggagataaagtagtaaccaggaaagaccctgctttcatggaacttgcattccaatgagagaaagatagtaattaaacaaataaatgaatatatatgttagttcattcttgcattgctataaagaaacattcgaggctgggtaatttatttaaaaaaaaaaaaaaaaaaaaagaagtttcagccaggtacattggctcatgcctgtaatcccagcactttgggaggccaaggtgggcggatcactggaggtcaggagttagagaccagcctggccaacatagtgaaaccctgtctctactaaaaatataaaaattagccaggcatggtggcgtgtgcctgtagtcccagctacttgggaggctgaggcaggagaatctcttgaacctgggaggcagaggttgcagtgagccaaaattgcaccactgcactccagcctgggcaacagagtgagactctgtctccaaaaaaaaaaaaagaaaaaaaatggttttattttggcttacagttcaacaggttatatacgaaacatagtactgatatctgcttctggtgagggcctcaggaagcttacaatcatggcagaaagcaaggggagctgtatatcacatgacaagaggagaagcaagatacagaagggggaggtcccagactcttttacaacagccagatctcacgtgaactcactgagtgagaactagctcattagcaaggggatggcaataagccattcatgagggatctacactcccatgacccaaacacctcccactcggccctaccttcaacattggggattacacttcaacatgagatttggaggggactacacttcaacatgagatttggaggggacaaacatccaaaccatatcaatatgattagtttagatcatgctgaggtttatgaaagaggtaggtttgagaagatggtggcttggatttgagtgttagcagtggaactgacagaagtgggtgactgcactttccccatatactcttgaccattgttgagtccgttgccacactgccagtagtctttttaaagcagatttttttttttttactttgaatttcaggggtacttgtgtaggtctgttatatagataaattgtgtgtcatgggggtttggtatacagattatttcttcacccaggtgataagcatagtacccaataggtggtttttggatcctcaccctcctccaccctcaagtaggccccatgtctattgttcccttctttgtgtccacgtgtactcaatgtttagctcccacttacaagtgagagcacgtggtatttggttttctgttctgtgttagtttgcttcggatgatggcctccagctgcatccatgctgctgcaaaggacatgatctcattctccttatggatgcatagtattctatagtgtttaccacattttatttaaccagggtactgttgatgggcatctaggttgattccatgtctttgctattgtgaatagtgctgcgatgaacatgcatgtgcatgtgtctttatggtagaacagtttatattcctttgggcatatacaaagtaatgggatggctggatcaaatggtaattctgttgtaagttctttgagaaattgccaaactgctttccatggtggctgaactaatttgtattcccaccaacagtgtataagcattctctttactcttcaccctcacccagcatctgttgttttttggctttttaatactattaaagcagattttagtcattattcaacaatatttagtaaacacctatttagagacagatactgttctatgtgcttgaatagaaatgagtgaactaaagtaacaaagctacttgcctctgtggaaattattttctagcaagagacagttgataattgtattagttcattttcacactgctgataaagacatacacaagactgggcaatttataaaagaaagaggtttaatggacttacagttccacgtggctgggccaggcctcacaatcatgaaggacggcaaggaggagcaagtcacatccaacatggatggcagcagacaaagagagagggcttgtgtagggaaactcttgtttttatttatttatttattttttaatttaaaagtaaactttaatgtcaaaaatgcaaacttgaggaggccagaaagatcacacacaagactgccacttcacacttggatggttgcacagcagtccggcagaggcgctcctcacttgccagacagtgcgggggccagggagaggcactcctcacttcccagagggtggcacggccaggcagaggcgctcctcagttttcagacggtgcagccgccaggcagaggtgctcctcacttcccagacaatgcaggggccggggagaggcgctgctcacttcccagcagaggctctcctcacttcccagatggtggggccgcctagcagaggcgctcctcatttttcagacggtgcggccgccaggcagaggcactcctcacttcccagacggagacagtgtgggggccggacaagggccgaacagaggcattcctcacttcccagacggtggaaactcccgtttttaaaacatcagatctcatgagactattcactaccaggagaacagcatgggaaagacccaccaccatgattcaattacattccaccaagttcctcccacaacacatgggaattgtgggagttagaattcaagatgaggtttgggtggggacacagccaaaccatatcaacaataaacataataaatatataaatatagtatattagaagttatagtattatggggaaaaggaaaagtaccgcagggtgatgggagttatgggtaggttgcaatgttaaatagggtagtcaggataggccccaactagagggtgagatttggacaaagactgcaggtagtgaggggatgctctgtgctgggagtgtgactgagtgttgagggacagatggaagccagcgagactgcaacaagagagtgagggaagggcggtaggagatgaggtcagagaagtaaattttttcttgcttaaagtcctttaaaggcctccattgctcttaggataaagttcacaattttgacacagtccacatagtttttatgatctggcacaacttacctctccatcctcaactgccccttccctccctctcatttgcactgtctcaatcaagccataatgaacttctttcaggttttcccaatagaccaatctgtctttcacttaagagtcatcacatatactggtttcctctgccaggaatgctctgtctccctctcttcaataagctaatttccatttagctttactacgttaggaactttctgtgccttctgcaaacttaggttagacagtgaaaacacaggttccctttgtcttctaggacatctatttgacagtcctttgcatacttgggactgatacctgattaaatggttggttggttgttgtcttcctcattgtagttaatctctatgtggggtctgcccactagtttgcctttgtattggagttgctggcacatagtaggcacttaaatatttattgactactgacttagagtcaaattgagaaagcataggttttcttttccctcacttcctcctatgtgtatatgaataagaattctgccaggatagcagctttttcaacccaggtctcctttgctttttttttttttttttttttttttaagatagattctagctctgttgctcaggctggagtgcagtggctctatctcagctcactggaacctccacctcccaggtttaagaggttctcgtgcctcagcctctggaatagctgggactacaggcatgcgccgccacacctggctaatttttgtatttttggtagaggcaggctttcaccatgtgggccaggctggtctcaaactcctggcctaaagtgatccacccgccttggcctcccaaagcgctaggattacaggcatgagccaccgtgcctggcctcctttgcttttaaaaaccttgaaattaattgctcttgtccccagtatttagcttctctcattttcattattgagatataatttatgtgtcataaaattccctttaaaaatgtacaattagtggctgggtgtggtggctcatgcctgtaatcccagcactttgggaggctgaggtgggtggatcagaggtcaggagatcgagaccatcctggctaacacggtgaaaccccgtctctactaaaaaacaaaaaattggccgggcgcggtggctcacgcctgtaatcccagcactttgggaggccgaggcgggcggatcacgaggtcaggagatcgagaccatcctggctaacacggtgaaaccccgtctctactaaaaatacaaaaaaattagccgggcgtggtagcgggcgcctgtagtcccagctactcgggaggctgaggcaggagaatggcgtgaacctgggaggcggagcttgcagtgagccaagatcgcgccactgcactccagcctgggcgacagagcgagactccgtctcaaaaaaaaaaaaaaaaaaaaaaaaaaaaaaaaaaaaaattagccaggcgtggtggcaggtgcctgtagtcccagctatgcaggaggctgaggcaagagaatggcgtgaacccgggaggcggagcttgcagtgagccgagatcgtgccactgcactccagcctgggcaacagagcaagactccgtctcaaaaaaaaaaaaaaaaaaaaaaagtacaattagtggtttgtagggttgtcacaaacttgtgcacccatcacctttatctaattctagaacattcttatcaccccataagcatagtagccacttcccatttccccatcctatcaccacctgacaacttctaatctgttttctatctctgtagatttacctattctgaacatttcatataaatgggatcatatgataagtggtcttttgtgactggctttttttccttagcataatgttttcaacgtttatccatgtcgtagcatatatcagttcttaattcctttttattgctagataatattccattgttcaaatgtaccacattttatttatccattaatcagttaataaacatttcagttgtttccattttgattgttatgaataatactactgtgaacatttgtgtacaaggttttgtgaacatatgctttcagttctcttggttatatgcctaggaacagaattcttggatcatatggtaattatgtgtttaactttttaaggagctgccaaacagttttccaaagcagctgcaccattacatcccccgtggcaacgtataagtatgttgtaaggcctaaaattaaagcccaatatgatgtgctgcctcaacatctggcagaaatcaggaaggcctccagtcacctaagtgcaaggtctcctccttattttgctcctgtggataaggtttcctagccaaacaaccctccttagccaaagggtgaggcgctgttcttttctttgattttgtttttttagggctggggtctcactctgttgcccaggttggagtgcagtggcacaatcatagctcattgcaacctccaattcctagactcaatccttctgcctcagcctccaaagtagctgagactgtaggcgtgagccactatacccagtggcattgttctttcttagagtagcaaacttcagttccttgccagcctgtgtcattattcagacaagccaatcacatcatcccaggggagctagggggcaccccactctcttgataccataaagctgcctcccacagcccctgattgttcactgtgttttaatccagcccttccatgatgttttcctcccttggggatgtgaatacctgttactaataaactactgtcaatctcatctgtccgtgtcaggtaaactactgtcaatctcatctgtccgtgtcaatctcatctgtccgtgtttgaccatggctgcaaccgtagggcaggaattcctcccgtattagcagggtgaataggagacaatcgaaacaatgagggtttgattcttctacatccttgctaacacttgttattgtctactttattttttattatagccaccttagtggacatgaagtgacatcttgttatgttttgatttgcattctcctgatgtgggacatcttttctagtctacagccataccaccctgaatgcgcccgatctcatctgaacatattttcatgtgcttattggccgtttgtatatcttttttggagaaatggctgttcagatcctttgcccactttctaattgggtttcctgcacttttattgttgagttgtaacagatatatattttttgagtcagggtctcattctgttgcccaggctggaatgcagtggcataatcatggctcactgcagtttcagactcctgggctcaaaggatcctcctacatcagactcccaagtagctgtgactacgtgtgtgccaccatgtccagcaaatttttttttttttttagagacagggtcttactatgttgcccaggctgagctataacagttctttatatgtgctgggtattgcctcccattctgtggactgtcttttcattttctagataatgtcctttgaaacacaaacatttttaattttaaggaagtccaatttattttttctttagttgtttgtgcatttggtgtcatatctaaggtcacgaaaatttcttcttctaagggttttataattgtagcttttacatttaggactttgatgcattttgagttaatttttgtatatgatgtaaggcagggcattatggctgaatcgtgtttcccccctacccccaaaattcatatgttgaagtcgtaacccctagttactcagactgtgacagtatttggaaatagaatctttaaagaggtaattaagttaaaatgagctcattagggtgggccctagtccaatataactagtatccttaagaggacattgggacacagacatgtatggagagaagatcatgcaaagtcacagggagaagacagccatctacaagccaaagtgtgagaagaaacaaaccctgctgacaccttgatcttagacttctagcctccagaactgtgagaaaataaatcactgttgttaagccacccagtctgattcctttttatgacagccctagcataccatacactaggggtacaccttcatcctttagcacatggctatctacttgtccccataccatttgttgaaaagactcttctttctcctttggatggtcttggcatccttgtcaaaaatcagttgaccatggacagttttatttctggagtctctattcccttatctgtgtgtctgttcttacaccagtaccacagtcttgattactctagctttgtaataagttttgagataaggaagtgtgcattctccagttttgttcttctctttcaagattgttttggctattccaggtcccttgcattttcatatgaattttaggatcagtttgtcagtttctgccaaaaaggcaataggattttaatagggattgctttgaatctctgtatccattgaggagtaatgccatctgaatgtaaaccaaaaatgaaatcctaagccccctgaccattcttttacctcagtcccttgacaagggcatctcagaggtaacctgaaaaaacaaattcagcccatgatgggggaaggtgggagtctgacatgcctcattatgccatcttcccttttggaatcaccaatagaacagacttgttaagtctgttaaacatttacaatctattctctccaagcctgctatctggaggcttcacctgcatgataaaaccatggtatccacaaccccttatcttaacccagacattcctaagtgtttagacaacaacttaactttttcaaccaattgccaataagaaaatctttgaatctacctgtgacccggaagctcccacttccccgttgtttcacctttctggaccaaaccaatgtacatcttccatggatttgattgatgtctcatgtcttcctaaaatgtataaaactaagctgttctccgaccaccttgggcacatgttttcatgatctgagggctgtgtcatgggccattggtcatttatatttggctcagcataaacctcttcaaatattttacagagcttgactcttcatcgacattaacaatattgagacttttgatccatgaacatgaggttttttcacatttatttaggtcttatttaattttttttgatgatactttgtggtttttagcatacaaaagtcttaaagcacttgaaaaaatttaattctaacttttattctgcttgatgctattgtgaattgaattgtttgttaatttcattttcactgcgtcctcattactggtatccaaaaatacaactgactttccttttttttttttttgagacggagtctcaccctgtcacccaggctgtagtgcagtggcgcaatctcggctcactgcaagctccgcctcccaggttaaatagaaccaacttatctatattgatcttataacctgcaaccttgttgaactcattttcagctttaatattcatgtatgtgtattgtgtgtttcccaagatttttgaaatacaagatgtcattgtattagtatgttttcatgcagctgataaagacatacccgagactgggcaatttacaaaaaaaaggggtttattggacttacagttccatgtggctggggaggcctcacaatcatgcctgaaggtgaaaggcacatctcacgcggctgtggcaagagagagaatgagagcaaagtgaaacaagtttccccttattaaaacatcagatttcgtgagacttattcactaccacaagaacagtatggaggaaaccacccccatgattcggttatctccacctggtccctcccacaacacatgggaattatgcgagtacaattcaagatgagatttgggtggggacacaaagccaaattgtatcagtcatcttgtagacatatttttacttcttcctttctgatttggatgcattttctttctttttcttgcctaattcctctgactaaaacctccagtactggcagaataggtaactaggcagacatgaacaggacaggagagggccctcctccccaggaatgtcaggtgaccatcaggtaatggtcatgcagttgttaaactatctaacataatggttgtagcttgcgccagggaaaggctgtctcccaatagatagaaaccacctgaagctggtgatcagcagcttcttaataagatctcaggattttgcgagtaggctcaagcatgcccaccaggaggcaaactggtggagtttaacaggtatatgaccctcctctgggaacactagtcaactggtaagggaaaaatacctcaaatgaacatgcacacaacttcagtaaacacactgtacatgcggccccaccccagggctagcaggccactgtgcatgtggacagcccaccccaagggaagaatcaggggagaagaaacacaaaccctggaatcatgccaatgtataaaaccctaagtcaagggtcagacagtatacttgaatctctcaagttgcctgcttggctcacttccaagaatactttacttcctttcattcctgctctaaaagtttttaataaattctcactcctgctcaaaaacttgccttaatctctcactctgccttatgccctcttggacaaattctttttattgaggaggcaagaatctcgagttgctgcagacctgtacagattcactgctaacagtacaatgttgaatggaagtggcaagagtaattatctttgtcttgttcctgatctcttttaccctctatcagaaaagttttttttttccttagaacttcatttctggattactactgtcaccaccattgtcactgtaaccacctgacaggtgcttcctgcccactgcacaaacaaaatcaattcatggagcattgcagtaaagaaagaggttaattgatatgaagacagccacactttgcaggtgatggaattattactcaaatcagtctcattgaaggttagggattttcccaaggtagtttggaagaaggggtggaggtggctagacaatggatacttgctgctgattggttgggggcacaatcataggggtgtggaaaacggtcatcttgtgcgctgagttgcttctgggtggggccacaggagcagttggtgggtccaggtggagccattggtgtcatgcaaaaaacctgaaaagatatcccaaaaggccattcttaggttctataatagtgatgttatctacaggagtaattgggaaagttgcatatcttgtgacctccagaataatggctgacaatcacgtccacaccatagaagaattcaagctcctctatccccctagcctggtggtctctcattagctttacaaggtcggttgagttttggggaaaggctattatcatttaaactataaactaaatgtttcccaaagttagcttggcttaagcccaggaataatgaatggcagcttgaaggctaaagccaggaggggagttggctagatgagatcaagaagttagccgggcatggtggtgggcgcctgtagtcccagcgactccagaggctgagccaggagaatggtgtgaacccaggaggcagagcttgcagtgagccgagatcacgccactgcactccagcctgggcgacagagcaagactccgtctcaaaaaaaaaagaaagaaaagcaaaagaccttgaaactggaaaatggatttcagttctccctagtctttgatgtaccaacttgggttaaaagttcttgtttctgtgtttgaagatagtgacttaaggaagaactgaagttgggaatgtagtttctgtagttaatattcatgttacaaaaatagaagtctaaacacctgaaaaaaagaatgaaacaactcataaactttttttttggatttgcaatgattttgtacattccattagttttgtaactttcatgaaggaatgcctattgtcctgttggtggcagtaaaacaccactcctggatcatttgttacttgaatatttcatttgtttgtttttaactttctctagtgcatcttcagtttgatgataggttagtttcaagatgctatctagtaaatgctaaaacaaaccaacaaacacaaatactgggcttctaattaggatactcaaggaattttaaagttttaaagtttcagaaataatacattttatgaaacagggatctgtatcaggaaaaaatgtatatcatcacagtaccatgcacatattatataataccttaaatttgttgaagcaatttctcattacttatttctcatgaaacaatccaaaatatcaagaagggaagacagttgaataaacacaccatttccaagtagtcagtgattaaattgaacttaatgtaccctaagaaatacaagctcccttgacagagaacaaacagaacaaaaaaatccagtttcctccttgttctatttttgtgagcaaaataagtactcatttaagcttccatcccttttacttaaaaatccctctctgtcttcatcctcttctgctttgctcttgtctttaatgaaggtctgttctgcccccattccaaggctaacttcctcactatgtccttgatcccatctttcctgtctctctttggagaagcctgtgatggttagttagttcacttattcaacagatattcactattgacagtccctgggttagatgtcaggggatacagagatgacattctgtgtcctgaagttgtcacatctaataggggaggcacacagacataagaattcagtgtgtttgatcctggggtttaaaagggatctttgggagcctaaaggcagaatgccaaattcattctgggaaactagtaaacattttccaaaggtggcatctaacctgagaataggacatgagggtgagagtgaacagcatgtagaagaggaatgaggaagaatggctgaggcaagtcctttgccatggcacatttgagggggatgcgcaggatacgattctgaggggctttaattacatttctgccatcaatttattgtggaattttaatcaaatcatctaaccttttaacacttaatttcctaacttataaaataaagagacagggaagcatgctctaaatttatgtcatgccagctgtgtcaatctgtgctataggtgtgtgtatatgtgtgtatgtttgtatgtcttatataaccatttcagtcctttaatgagtagataagaatctttgtataatttgcatgtttgttgtttaagtgcttggctaaatttatctttgcctcttttacaaaaaaaaaagtgtttacagaacaatataataaaattaggagcaaaggaatattttatttgttatacttcaagatgaataccaccaaaatgttttcatttcaacttaaaaatctctttataaccatacttgaatataaacaacccatttgttctacattagtgaaatgttagtgtgtgtattttctagcactcacacctctgcactgtgatcattctatcaggtatttctagatatccaagcaatgtgttggatctatgtaaaaaaaatctgacagctaccatcaataacaatataattgtgtagcatttaaacagtttgtaatgagctctcaaatgcattttttaaatgtttaataaataaaattaatagtaagacacctatcatttattgagcacttaaaatgtatctgatgctgtgctaagcactttaaaactaatcttcacggccgggcacattggcccacgcctataatcccagcactttggaaggccgaggcaggtggatcacgaggtcagaagttcaagaccagcctggccaagatggtgaaaccccatctctactaaaaatacaaaaaattagccgggcctggtggtgggtgcctgtaatcccagctactcgagaggctgaggcaaagaattgcttgaagccgggaggcagaggttgcagtgagctgagatcacgccactgcactacagcctggacgacagagtcagactgtctcaaaaaaaaacaaaaaacaaaacaaaaaaaaataactaatcttcactacctttaattttgtttattgtagtataatatacgtaacataaaatgtacaattttggtcagggcagtggctcaggcctgtaatcccagcactttgggaggccaaggtgggtggatcacctgaggtcaggagttcgagatcaccctggccaacatggagaaaccccatttctactaaaaatacaaaattagcgggtgttgtggcgtgtgcctggctactcaggagactgagatgggagaatcgcttgaacccgggaggcggagcttgtggtgagctgagatcgcaccactgcactccagcctgggcaacagagcaagactccatctcaaaaaaaaaaaaaaaaaaaaaaaaagtacagttttaaccattcctaagtacacagttcagtgacattaggtaaattgacattgttgtgcaactatcaccaccatccatctccagatctttttttcatcttgcaaaactgaaactcttgcacctgttaaatagtaactccccattcctttctccccttagcccctggcagtcaccattctgctttctgtctctatgaatttggctactctaggtacctcatgtaagtggaattatatcgtatttgtcttatctctggcatatttcacttagcatagtgtatgacccttaatttttttactgacattaattaaaagaaatcctaattttaacaataattctattactgttaatattgtattactattttatcagtgattctattactgttaatactgtattgacttgttggtatgaatcaatatgctcattttacagattaggaaactaagacttataaaaagttaaaaaacttggttaaagtcattcagttaggcaaatgacataccacaatcacaactaggcctgtcttactacagaggcagtgttcttaacttctaagctatggggtgtgtgtgtgtgtgtgtgtttattttaaaccttacaattgctctgtgaacaagagattatatcctacttgatactcaaatcccaggcatggcgacatatgcctgtaatcctagctacttggaaggctaaggtggaaagatcacttgagcccatgagtgcaagactaatctgaacaacatagtgagacccgttatctaaaaagtaataaacaaataaataaataaaagccaggtggctctcactaaaaattccatgcctttttacgttatacagcaggagacccttaaattatagtgaaatcagtctccattccacaaatctatgttgacatcatactatgagtgaaaacaggttttttaattcaagttgtttgaattaagcatattctattgtatgttcaaagatagttgtcccaatttaaaaatgtccttggttgaataggatagaagcagagccagagcaaccaagagccattgctatatgaacaaataattgaatttaggctaatgaaaatgaactcactgtcaaaaatcatcatgaaattaaaatattctctgctcttgactggctggaataatatttgattcctgagttctgcctttccacttattctgtcataatctttgagatatatgaagtcatccctgaatactgtttaatgctctggttaaactccatttcactctgaccaatcagagtatgtgagctgatcataaggagctattatcaagagacttgtcagaggattcactgcccaatatgtttttatgaccctttttatctgtaagagttgctggtattgctttttagaatgaaatagactaattttgtccattacagtgttgatagtttgataactcactgtgggaatcaattgatcttatcagaataatataaccagtagaggaaatgtaactgaagcatatacagttttatttaatatattgtttatgcaggttgagaaaaggctgaaatatgctccttttgctagaaatgtaataactaaaacgcccatagccttgatcttttttatcttttattgcttttccttgactaagagaatttggttttggtaaagctaaatgaatttagaataaagtcatttatttgtgtcatacgtaagcttgattaagaaggtttttatggccaagagccatggctcatgcctgtaatcccagcactttgagaagctgaggcaggaggatcacatgagtcttggagttcaaaaccagcctgggcaacatagtgagatcttgtctctacaaaaaataaaaataaaaaaaatagcaaggcatagtggcctggcattgcactccggtgatcacaccattgcactccagccctgggtgacagagtgagatcctgtctcaaaaaaacaaaggaagattttttttttttctatttagaaagagagtgcataaaagagaaaccataggcagggacagtacctcatgcctgtaatctcagcactttggcagggcaaggcaagcggatcgcttgagtctaggagtttgagagaagcctgggcaacatagagagacctcatctctccaaaaaatacaaaaattagccaggcacgatggcacgtgcctgtagtctcagttatttgggaggctgagatgggaggatcacttgggcctgaggggttgaggctgcagtgagccatgattgtgcactgcactccagtatgggcaacagagcaagaccctgtctcagaaaaagaaagaaaccataaaaagtataatggcttgaaaaagatggtgtatttctcccacagatattaatctagagagaaaatgactggccccaaaaggcagatagctcagttacataagatcactcaaggactcaggttctataatgaatttgttcaattatctcttaggatgttgtcctcatgtacatggttaaagtcagacacatctttcaattcggaggaagagggaaatttcaagcaaaagtggagggaaggcaatttccttttaagcaaatagtgaggaagttgcatacatcacttttattcacattccattgacaaaaattttgtccatggccacacttagctgcaagggaactaggaaataattgtctgaaactcagcagccatgtgccgtgttaaaattattatatttatggaaccaggagaaaacttttttttttttttttgagactgagtttcgttcttgttgcccaggctggagtgcaatggtgtgatctcagttcactacaacctccacctcccaggttcaagagattctcctgcctcagcctcccgagtagctgggattacaggcagactccaccacgcctggctaattttgtgtttttagtagagacagggtttcaccatgttggtcaggctggtctcgaactcccgacctcaggagatccgcccaccttggcctcctaaagtgctgggattacagacgtgagccactgtgcctggccgggagaaaactttttaagaaaacaatcagcagtctatatagtctaccctactgacctttcagtgtctgtgattacctatattctcacacatagacactccctctctcccaagggagacattccaaggctcccttggattagttcatctgctcaaagtcaagaatacccggatggtgcacattcctgattttcaggtctgtgatggtccctcacagttcactaatgtgttttctgttcatctcacatccagtatacaaaagtggtaggaaaaatataactgcaataaaagctgtcattcagaagatggaagaatgggaaacatgtcacagtcagtccgtaggaatttccaagattcttgctatttcagtagaggagatttcttggttagcctgtgtagctgtcccctggttctaatttctaagaactacaccattttccattgtcctccatggccatatctaaagttggtgttagaggccaggcgtggtggctcacacctgtaatcccagcactttgggaggccaaggcaggcagataacttgagatcaggagttcaagatcagcctggccaacatggtgaaaccccttctctactaaaagtataaaaaaaaattagctgggtgtggtggcaggtgcctgtaatcccagctactcgggaggctgaggcaggagaattgcttgaaccccggtgggtggaggttgcagtgggctgagattacaccactgcactccagcctggacaaaacaatgagacttcatctcaaaaaataaaaaaaaaataataataaagttggtattagagaatagtacatcctcctagggagctgcacactttcaaaaacttgctacttgtggagatttggaagcccaagagttgtgttagtgatcaaacaaatgactcttttttaggccaattttgatttcttttgggaaataattctctgaatacttttgtcgacttgtggtctttttgcttgcattcagttccttctgagtaaacaggtctaaagatttcttctagacatagttcctaaatcttctcatttatttgtttacctgtttgcatttaatggcccatcctttttccctccattttaatggtggttaccctgaggctagctaaaatcacaaactggagtcagaaggcaataccattaatttgatctttgcctgttagctggctgtatgttttggctgagaagtcttaatgagaggtacttaggaaaaatgtagagccttttaaatccttctgtttggggacaagtagtttgattttctaatcctgtatccttaaattactgtacttaatcagtttagattgtagaccatgttctctgaagtgacaggtattataggcacacagtctgccttccaagttatcaaaggcagtagttttactaaatattgtgacatgacataaaaaggatcattagttttccagactgcaatattggttttttcaccttgatctttactcagccacaaagccaagaaacatatttgacgttttaagtttttattttggcagtaaatcaattctggttacctatcccaaaatataataccttaaataagaattttttttctttttatgtgatggtatgtggagatagcacatggtccagacctttatgcatctcagctccatgagatcattcacagacttgtgttcttttcatcctgttgttctgcagcagtatttctcatgctcagaactattggcattttggggcagttaattctttgttataggtggctgtcatgtgcattacaggatgttcaacagtacccctcatctctacaggatgcccataggacatgctcagttgagacaaacaacatctgcagacattgcccagtgttcccctgggggcaaaatcacccctggttgagcatcattgctttatagttgcctaggatctcatcgtcatctgcatgatcaaagcagattttgatccataatgaagagaaaaatcaatcattcgaaatcactctagattttataattggcagacaaaaacattaatactgtaactttattccatatgttcaaaaaaataagtaaagaaatgcaagatatttaaaaagaaccaaattaaactttaagagataaaaattacaatgtctgatagaactaagaaatacattgaataggatgaagggcagatgggacattgcagaagaaaagattagtgaacttgaaaacatagcaattgaaactattcaaaattcaatacaaagaaaaagcaaatttaaaaaaaggcagaaaggagcatcagtgagctgtgaaatccttcaaaaggcctaatgaatgtgtaattggaggacctgaaggaaaggatgggagtgaatggtgggcaaaaagcacttgaagaaataatggctgatatttttccaaatttgatgaaaatttttccaaatttgatgaaaattatagacccaagaagtttagtgaattccaagcaaaagaaatatgaagaaaactacatcaaggcgtgttatgatgaaattgctcaaaaccagtgataaaggtaaaatcttaaaaagcatccaaaggaaaaaagataatatgtgtaaagaaacaaagaaaagtatatcagcagatttctccttagaaacagtgccagcaataagacagtgggaccacatgttaaaaatactaagcaaaacaaaacaaatgcaaaaatgtctctcaaaaactaagatgaaatgcttttatagacatacaaaagctaaaagaattcatcactaggagatctggattactgaaaatgttaaaggaagtcctaaggaagaagcaaaataatacttcacagaaatatgaatctgctctatgcaaaagaattggggagcgtggcaaatggtacctatgtgggtaaaaatgtaataagagtacaattctgtattcttcaggtcctttctttgcttatcactttggtgggtttctcttcctctgtagctttcaacaataagtccttgaaccttctgcattttttttttaagtcagagtctcacactgtcaccgaggctggagtgtaatggcgtgatctcagctcactgcaatctccacctcctgggttcaagcgattctcctgcctcagcctcccgagtagctggaattacaggtgcctgccaccatgcccggctaattttttgtatttttagtagagatggggtttcactatgttggccaggcttgtctcaaactcctgaccttgtgatccacccaccttagcctcccaaagtgctgggattacaggagtgagccactgcacccggccaccttctgcatttttatattgcattattgcctttggagaagtcgtaaatacacttttcaaaaaaagtaatttctaatttttgtcctaacccaacttccaatttaataactgtagtgattctatataaaatcttcagtgggccaggcaacttgtgtacagcacaacttcagggataccattcccatagactatgattgcacatctgtacatcatgtttctgattataacactgcattcaccttttcactctcccatcaaaagtatttgagttgaacttgagtactgtttcctaaaaacatctttatctcatatatcatctccccttttctttgtataatactgagccttcctagcccttatgttgtggcttaaaccccaccttctttaaaggatgattctaaactctttctgcccaaaatgaacatctactgtgattataccatgtgtcattcattatgacaccaaaatgccatcttgttgttatttagatgttttgtatgtgtatgtcttgtcttgaattcttcaattaaactgtttattttttaaagacagtgtgaggctgtttatcccctaggagagcaagtgaagttctgcatgttcagcaagcatccctaatcccagaattgatgcataaagtagcaaaaggccaaaggattattaaccttatgttttttccagttgttctatttaagcaaactacaccccatctaaaacaaggtttgaagtagtttggacttttccctaaagatttgatttctgcttggttttgaagttttgtattagaaagaaatcatactaacccttacttcatttgattaatatttgttaattgtttatatggtaaatacaggtctcttcacatagattatgtatactgaactcctttcttttgaatacaaaagccccatatttcccaaatttagtttttatttaaacaatcatatcctggatcacctgaggtcaggagtttgagaccagcctgaccaacatggtgaaactccatctctactaaaaatacaaaaattagcttggtgtggtgggaggcacctgtaaaaccagctacttgggaggctgaggcaggagaattgcttgagcccaggagggggagattgcagtgagccgagatagtgccactgcattccagcctgggaaacaagagtgaaactccatcttacaataaataaataaataaataaataaataaataaataaataaataaataaattaaataagccctaattaaaatttccctcagtattaccagtgttgggtatggcctcacattgtttccatcctgcttttcccatatttaataggccctcactgactcctgaatattgaaaattgagttcaaatacatagtttattcctcgaaatcctccctccatactctgctcagatggatgattccaacctcaccatggatctctgctctacctaaactggaagtggactcaagattagccacacataccttacgcttgcctgctttctgtctgggaataggcttcctccagccttcctaaatctcatgtttttcaagtctagctcctatctaacccctgatcatcagttaccttcctctatttttacattatcatcctaaatagagataactcacagggaatactgttgtattatagtttacttgctaaagtacatgcttttgatatatatatatatttttattatactttaagttctagggtacatgtgcacaacgtgcaggtttgttacatatgtatacatgtgccatgttggtgtgctgcacccattaactcgtcatttacattaggtatatctcctaatgctatccctcccccccacccccccaccccacaacagtccccggtgtgtgatgttccccttcttgtgtccaagtgttctcattgttcaattcccacctgtgagtgagaacatgcggtgtttggttttttgttcttgcgacagtttgctgagaatgatggtttccaatttcatccatgtccctacaaaggacatgaactcatcctttttatggctgcatagtattccatggtgtatatgtgccacattttcttaatgcagtctatcattgttggacatttgggttggttccaagtctttgctattgtgagtagtaccgcaataaacatacatgtgcatgtatccttatagcagcatgatttatattcctttgggtatatacccagtaatgggatggctgggtcaaatggtatttctagttctagatccctgaggaatcgccacactgacttccacaatggttgaactagtttacagtcccaccaacactgtaaaaatgttcctatttctccacatcctctccagcacctgttgtttcctgactttttaatgatcgccattctaactggtgtgagatgatatctcattgtggttttgatttgtatttctctgatggccagtgatgatgagcattttttcatgtgtctgttggctacataaatgtcttcttttgagaagtgtctcttcatatccttcacccactttttgatggggctgtttttttcttgtaaatttgtttgagttctttgtagattctggatattagtcctgtgtcagatgagtagattgcaaaaattttctcccattctgtaggttgcctgttcactctgatggtggtttcttttgctgtgcagaagctctttagtttaattagatcccatctgtcaattttggcttttgttgccattgcttttggtgttttagacatgaagtccttgcccatgcttatgtcctgaatggtattggctaggttttcttctatggtttttatggttttaggtctaatatttaagtctttaatccatcttgaattaatttttgtataaggtataaggaagggatccagtttcaggtttctacatatggctagccagttttcccagcaccatttgttaaatgggaatcctttccccatttcttgtttttctcaggtttgtcaaagatcagatggttgtagatgtgtggtcttatttctaagggctctgttctgttccattggtctgtatctctgttttggtaccagtaccatgctgttttggttactgtagccttgtaatataatttgaagtaaggtagcgtgatgcctccagctttgttcttttggcttaggattgacttggcgatgcgggctcttttttggttgcatatgaactttaaagtagttttttccaattctgtgaagaaagtcattggtagcttgatggggatggcactgaatctataaattaccttgggcagtatggccattttcatgatattgattcttcctatccctgagcatggaatgttcctccattcgtttgtgccctcttttatttcattgagcagtggtttgcagttctccttgaagaggtccttcacatcccttgtaagttggattcctaggtattttattctctttgaagcaattgtgaatgggaattcactcatgatttggctctctgtttgtctgttattggtgtataagaatacttgtgatttttgtacattgattttgtatcctgagactttgctgaagttgcttatcagcttaaggagattttgggctgagacgatggggttttctagatatacagtcatgtcatctgcaaacagggacctgctttacttaaatgctgtgtaaagaatttggtggaagctctttgaaatttttcttcatttgttactcttctctggaggagctctgcatttccgcatgggatgtcagtttgcatcacagtagagaatggacattttgtgggtaccgtggattgagctagtggtattgagagacaggactaagctggatttcctaggccgactaagaattcctaaacctagctgtggacggtgaccacacccacctttaaacacggggcttgtaactcagctcacacctgaccaatcaggtagtaaagagggctcactaaaatgcaaattaggctaaaaacaggaggcaaagaagtagtcaaatcatctatcatctgagagcacagggtgagggacaatgattgggatataaaccccaggcattccggagctgggatcgggcaaccccctttgggtcccctcccattgtatgggagctctgttttcactctattaaatcttgcaactgcacactcttttggtccatgtttgttctggctggagctgagcttttgctcaccgttcatcactgctgaatgctaccatcgcagacccaccgttgacttccagccctctggatcctgcagggtgtccgctgcactcctgatctagtgaggcgcccattgcccctcctgatggggctaaaggctcgccattgttcctgcgtggctaaatgcccaggtttgtcctattctagccaaacactagtcgctgggttcaacggttctattccgtgactcacggcttctaatagagctataacaccgcatggcccaaggttccattccttggaatctgtgaggccaagaaccccaggccggagaacaaaaggcttcctaccatgttgggagcagccgtcaccatcttgggagctctaagaacaaagacccaccctgcccccgccgcccgtaacagtatgagggagtaccagataagaaatctaaatacattcctaggtcttcctgagctagttcttttttgtaatgacttcattattcaagttaatgcctaatacctaagagatattcaaatagaattgcgacaacttactcaaatctgtattcatcttcaatttgaaattagtactgccattctctgttgataattgagaggttactgaacatctttgcatctttgatatgttttcttcttcttcttcttttttttttttttttttttgagatggagcctcactctgccgccaggctggagtgcagtggcgtgatcccaggtcactgcaacctccacctcccgagttcaagtgattctcctgcctcagtctccctagtggctgggactacaggcgcatgccaccatgcctagctaattttttttatctttactagagaaggggtttcaccatattggccaggatggtctccatctcatgacctcatgatcctcccgcctcgccctcctagagtgctgagattacaggccgtgagtttttcttcttcttcttctttttttttttttttttttttttttttgagacagagtctggcttgtcacccaggctggagtgcagtggtgcgatctcggctcgctacaagctccgcctcccgggttcaggccattctcccgcctcagcctcccgagtagctgggactacaggcacccgccatcacgcccggccaattttttgtatttttagtagtgacggagtttcaccgtgttagccaggatggtcttgatcttctgacctcgtgatccgcccacctcggctcccgaaagtgctgggattacaggcttgagccaccgcgcctggactcagtttttcttcttttatttggataactatagatttacctacttattctctattcttccttctctttagtgctctgttgtcaatttattatatttatcttatctcagatttcttttctttcttttatatgaccagtgtgcaatccctcctatattgtggtgggaggtgggagaggtttaccccagcaagcgtgggactggtagtggaaacatcttctacccagacatggtaatgttttattttgtaaaggttgagttgagtagatgaactgaaggaggtaattgagacaagtgtgggccatcaagcaagactggcctgaggggcatgtcaggaatcggagttcaaagccaagaatagaccaaactgcaggaaagcaaaagcaaaatcaaaatgagtgtaaaggaaggcagcctagaaatgggggtaagggtagtgtgtggagagcaacgtgggtgtttacctggtactaggcttttacatgttctacaagcccttgcatggttgaggaagctccattttgaagaatcagtattggagcagaagccaccagtcagtttcttcttgattattaaatcataagcaactcctccttaaataaaaagtaatgaaagatggcatattttaaataggacccattgtattctcagtagcatttaaatgaaaaggtatgttttgggggtgagaatatactacagtatttcacaatacaatatttccatatgagtgattttattttatttttttatttttgtttttatttttgagacagagtttcactcttgttgcccaggctggagtacaatggcgcaatctcggctcactgcaacctctgcctgccgggttcaagcaattctcctgcctcagcctcctgagtagctgggattacaggcatgcgccgccaatcacaactaattttgtatttttagtagagacagggtttcactgtgttggccaggctggtctcaaactcctgacctcagatgatccacccatttcagcctcccaaagtgctgggattacaggcgtgagccactgcactcaccctgagtgattttaaaatagagaattgtcttgttctgagattaaggttagcttatcgttcagctactgtttcagtaaaataaataattccagtaaaggaacgataattgtagttatcttggcttggtatattatgctatggttaggcaattttagagtaaagagaagaaatcaaaagctcttgcttagcacacttgctgcttaggcattcttgttggaaaataatgcgttctcatttcagagcaaagacagcaaagctgactctggtatttggagagctaaaggagtgaaacttcttttaagaacgggaccattcgagccctgtaggagcttttgagcatgcgtattcaactgctcactctcatgtctataacccacgctgcttctccaccgttatgtgcagaccataagccctacagtggtgacagctgcttttaggcccctttgccttaaatacagtagaatgcttatatattagacttttagttcttgaattttggctagatatttcaactttcatttaaatgttgtaacatcccatgatcagagcattataacctggagtatcactgataggaaagaaatagtaaaaaaaagtatgtaaatatgtaaatgtaaacataaatggaaatttgaactcagttatttgactaatgtgtgtataccatctggctaactccatttcaaacaccttatgcatttacttgtagtttttatcttctctaaatataataacttgtagaggaggagtgtggaagagtcttccatttaccaaagtgatttctgtgtcattttcttgagtttgatttcagtcttgtgactggtaaattctaagtatctgcccttttgagcaaataaacttgtcaatcagatattttctaaaggggatattttttgttaatattagtttaggttcatgtggacattgtttaaaaagctttgggaactttaatgattggattttataacactttattagttatagccaactatgttactacttccatcaacacccatactctgtttctttgtgaaatgaaaaatattgttttatttgacactctcctccttattatattgtacacagtaaaatccaaacggaagccaataacttctgaactctaattgtgtccatcctgtaaagcatatgggtttgttcactgattcacttccagagaactaggtcatcatcatgagaacccccacattccccaaatcaaatttacatgttcttgaaggaacaccaaatggtaatgagtactttgctaaataacgttgacctttatttattttcttatggattttatgctgctttactatgtgtcagtatccctcccttcttttagaaatccataaacattgcacttgctttcattttgaactttcttcttactaatttagacattaaataaaagagacatatatgcttattatcccctagtttaatatatatattttaaaaagttaagctgatattttaattttatttcttcacgtgagcatcatttattcatttgttcatttactcaatatgtatttaaatgatctctgaccacagtgactaaaaactgttgggtactagaggtgcgaaaatgaatatgttgtgtggttaatctcagagtttcactgggaagtaggggagacagacgtgcctacaaataattgtcgtagaagagttgttattgtagggtcataaatgggacaggatgcaaaggcagaggagggaagtaatgacagggatgacttgaaagagaaagtgaggctggacatagtggctcacacctgtaatcccagcactttgggaggccgaggtgggtggatcacctgaggtcaggagttccagaccagcctggccaacatggtgaaaccctgtctctactaaaaaaacaaaaatgaaccgggcgtggtggtgtgtgcctgtaatcccagctacttgggaggctgaggcaggagaatcgcttgaacctgggaggtggagattgcagtgagctgacattgcaccattgcactctggcctgggtgacagagcaagactctgtgtcaaaaaaaaaaaaaaaaaaataagagaaagtgacatctgactcttgaaagattagcaagacaaaacaaggaatgatgttttaggcaacaagaacaatatatgtagataagaaaagcataatttttaaaaagcatatttgggaaataatgagaagtttcatgaggacattgggcatgaggggtcaaggtgacagatgcaattggaaaggtaggatagatctagcttgtctgaaggatgtcttgtgctttgaacctgtggaccagaggatatggatactttcagacaattgcatgatcaaatgttttgttttaggaagataatttggaggcgaaaagactgaaatgtgaaggtactggtaatacatatggagaatagttaggatactattagaatagtctgggggagaaataatgaaggcttctttaaccaaggctgcaacaataggggtgtagaggggcaaactgagcagcatttcccaggtactgtagggaacttgggtacagttggatatgtgagacaacgaatagtgagtcattactatcctccacttttcttttatcttccttttaaaaacttccctgtcctggtctctctttaattttaaggaaaagagctgctaaaatgtgtgctttatagagaaagaagcttactagaccttacatgttctcacttatggcatttagtgataaccagggtgtccctaagcaattgaatagtgataccagaccagcttctgcatggtacagctttaatgtattattgtttgaacttcattaataattagacttgcgacgaaagtaaccagttcaagtgatcttataatcaactttgtgcctcagcacctggaactttgagagagccactgtgttcatttatcaggaggcattctgcttcctctgtggtgtgccattccctgacttggtaaagaatattgtctctctggcagttttgtattagtgagttatacaaaggaggtcatagcaaaccacctgtactttagaaagttaacacagaaacactgaagaggtatttcttctttgtggtacttcttatattcaagcttggctctatttccgtagcacaccagtccaggctctcattttctcacattcgattgactacaagagctttctgacttgtctaccttcagtctcttcctctcttaagctgtcctgccctctgctattagattaatctttctaaaaggtaatcttcgtagcattcctcacctacttgttgtccagtacccatctttttggaattccattttcatcataatttggcctcagatgtacttactggcctcaaatgtacctattggacacattgggatgaagtcttgttctgttgcccaggctggagtgcaatggcatgatctcggcttactggaacctccatctcccaggttccagtgatcctcgtgcctcagcctcctgtgtagctggaatcacaggcgtgcaccaccacaactggctaatttttttgtatttttagtagagatagggtttcaccatgttgcctaggctgttctcgaactcctgagctcaggccatcctctctcttcagccacccaaagtgctgggggttcaggtgtgagccactgcagtcagcctgttttatgcttttaagtttcttctctttcctgaagtagttgactgttacataacatgtattatccaaagttcacaggatactctaaataccaatattatgatatccttatttttaaatatagaaacctttctcctcttaccaaaaaccacagtgactcagctacttgcatgtctaaaatggtctctgcatttttctgtggctagtctttatgatggttatagatcagtaatagcctttttggaagcataatattatgtattaatcatggcattcttaaggaatcactgcaattaaccaggtagaccaatttagttggaccgtggtctgtttttttagtatgtaaaaacatgggttcaggggattaaaacaactcaacattcatgaagaatatattttcagatgctcttacattccctgatttttcaatactgctacgatttttttttacagagtttctttacttatgaaattgatataaaataactgccttgtcataagaatgtataataactgagaagggcaaagactgtaagctaaatttactcagcatctgctacatgggagtgactcagttcattgctcagcaaacccacaagttactgtgttgtgtctctgtggggtctcctggggagaacagaaacaataaatgttaaatctgtaaatgtgtcaaggggtcactgtggttgactcttggttgctaaaggaaacagaggttctaaggccctgtaaaattataatatttcaaagtgaaaatgaatgaattaatagaagaagctgagacaaggatcttattttgtgtttgttttcctctcaatacccttgccaattaacattttttgaatctcttgctcttctccactgtaagcctgccctgatattttctaattggatacagagataatacataactggccaggtgtggtggctcatgacagtaatcttggcactttgggaggctgaggtgtgcagagcactggaggccaggagttcaagaccagcctggccaacatagtgaaaccccatctctactaaaaatacaaaaaaattagctggctgtggtggctcacacctgtggttccagctgcacaggaggctgagacacgaggataactgaaacctgggaagcagaggttgcagtgagccgagatcatgccactgcattccagtctgggagacagagcaagactttgtctcaaaaaaaaaaaagagaatacgtaacaaagaagtaagaaaacaatttcaagtggtgataaatgtcataaaagaaataatacaaattttttactgcccttcattagataaagatagtaagagagaaggcctctgggccgggcacggtggctaatgcctgtaatcctagcactttgggaggccaaggtgggtagatcacctgaggtcaggagttcgagaccagcctgaccaacatggtgaaaccccgtctctactaaaaatacaaaattagccaggcatgatggctggctatttttgaatgccagtaatcctagctactcagtaggcggagtcaggagaatcgcttgaacccaggaggcagaggttgcagtgagccaagattgcgctattgcactctagcctgggcgacaaaagtgaaaaaaaaaaagaaaagagaaagcctctgtgagcaaaatgacattggaattgaatgatgcagtagagctagccatatgaagattggcggcaaaaacggtgcagaggcccttctgaaattctgctgcatctatttgaagccatgagtgtgtgtgtgtgtgtgtgggcagggggcggggggtatgtgtttatgtatggtgggagagctagagtgggaggaggctgtgcaatctattaccacctttgtttcacaacatggacttgtccatttcaagaaaaaaaaaatgaggctgagcgtggtggcttacacctgtaatcccagcactttgggaggctgaggtgggtggatcacttgaggtcaggagttcgagaccagcctggccaacatggtgaaaccccgtctctactaaaaatacaaaaattagcctggcgtgctggcacgtgcctgtaatctcagctacttgggaggctgagacaggagaattgcttgaacccaggaggcagaggttgcagtgagccaagatcgtgccattgcactccagcctgggtgaagaagagagactccatctcaaaaaaaaaaaaagaaaaaaaaatgaatgtccctatcttgacatattaattttgtagaaataaattcacttgctaatacatgggttggcccatataactcctccattgaaaatattattttttacagtgacagctgttaaacatatacctaacattctatgtaatatgaagatgaagatgttagagattgcaaatttaatagggaattggagatggaccataggaagaaggtagagacaattcacaacttactaggatgagtacaacacctcattattttttaacagcaatgacaatacacacacataaagataaaaaaatgctggtctagcttgagaggatcagggaatagtctagattctatacacgataattttaatctgatcaattcaaaatttaaaaacaggcttctgctaacatatgtttataccttctgcttaagcttgaaaataaatatgagctttatccacactgtccaggaaaggggatgaacgaactgagatagcattccattttcaagcctgtgccactaacatggcttcaagaaagcagctcttacagagacgctgtggctgagctgccaaggatgtagctccttgaactgttcatctggaaaagaaagtgcttatcagttaaaaattgagaaggcagatgtgctttattataacaactgtgtgtttagaagtgacagttctcagggcagacttgtggataccccttctcaactcaacctaagaatcttagattctttcttaccagatggcaggctcaggttcctgaccagttccacgtggaataaagtggtgaagcataatctttctaataagataggttctttatgggatacattacttgaaagaccagattacagtgcaggaaatgctaggttccctgccgtgcatctgtgctctgaatatcttggcttcctgactctgcctctgacaagttttatgatgatgagcagtcacttatctactgcctcagtcttttcaacaggataaacatgttagaccttggtgttttctagggtccaacaaggtttcattactttattattctgttatatctagagtatctgtttcagtttgggcagccctatgagagatactgtccaaagtgtgttcttgaagtagcaagcatgattgtgaatagtctagaatggtccagaaaccacctcataggagacccagtttgcagcagggatgattagcttagagaaaagaaaattaagactgtctttgaatattttaattaacgtcacgtggaaaaaaagaagtagacttagtctgtgttgctgtaaaatatttaattgaggtgactcttataggaagtgctctaaccacaaaaggaaaaacaaaacaaagggaacaggaggaaatttttagagatgatggataagtttacggcactgatagtgataatggtttcacaagtgtatacttatggcaaagtacatcaaattatacatataaaatatctacaactttctgtatgtcagccatactcaataaagcaactaaaactatatataactgagcctagttactagaagtttcagatgtctggcttactatgtacagtatagccctttcctaaatgtccagtaataagataagcagcctattgagctacatgtcaataatgacacagaagtagaaacaggccagtgcggtggctcacgcctataatcctagcactttgggaagccaaggcgggtggatcatctgaggtcaggagttcgagaccagcctgaccaacatggtgaaaccccgtctctactgaaaatacaaaattagcagggtgtggtggcgagcacctgtaatcccggctacttgggaggctgaggcaggagaatcacttgaactcaggaggcagaggttgcagtgagccaagattatgccactgcactccagcctggttaacaagagcgaaactccatctccaaaaaaaaagaaaaaaagaaaaagataaagaaaaaccaagtagaaacaaaatgactctctacagaccataagacattcttacattaataaaggcattacagtagaatctgatcacaaggattggcaataggtattagtgatgctaccaagactattcagaatgttattaaattgcttttggtaggggaaagttctcctttctatttaaaaacaaaaaaccttctttaacagttatgccttaaattttacaaggttagagcattcctaaaaagctaggtaagtctacaatattttacagagatgctataaacatgtgacctcaaccacctaccaaaatgtcaggtaactgcacagtatcttctatattgtactctaattcttcgatgtttgagttccaactataaaataatgagactcatttccctgtgatacaacttgtaagctcagtctcattacatttcattttagcttttaagtagcttgaataatccttaaagttagaaagcagcatctgatctgtctttctatatccagaagcatatagtacagtgttgagcaaaatcaagacttttttttttttgagatggattttcactgtgtcacccaggctggagtgcagtgtcatgatcttggctcactgcaacctctgcctcccaggttcaagtgattctcctgcttcagcctctccagtagctgggattacaggtatgcaaccaccacacccagctaatttttgtatttttagtagagacaggtttatgatatgttggccaggttggtctcaaactcctgacctcaagcgatccgcccacctcggcctcccaaagtgctgcgattacaggtgtgagccaccatgcccggcccagaatcaagacttgaatgaaagaaagagtgtgatttgtgcaggattttacactaccacgatggcaccactactcactgtgtcatctgtattttgacctgtttgctggatcttaggaacttgcaaaatcattgaaggttcatctttttaaaaattgtcaatcaggcaaagaatagctagagaattaggttttgctctcctagtcaagaagggcatggatcctttgctacttattgatgtgtctgtgtcttagtgaaccgaagaggcaggtgatctgacaggaatgtcttttcagtgtttgactaactctctttctattgtgaatatatccaaagttctttttgtctttctaaaccctaacccagataaacgcaatgtatttttacacattttcttttcttctatgtgatttcctggaaagaatgaaaaaaactactagttgttgagcacctaccatgtgctaggctctacgagaggttcctttatatgcattaatttattaaattttcagagcagctttgccagctaggtgatgttgccatacagaagctcagagggctaagtaacttattcatgtcatacagctagtaaatgtgactaaaagatgatgtaataagcaatgccctgttttggtcttagagatatatttaattatcattactcttggatttttgtctaggcccatcccagtagtataaacccacttttgtctgcatctactgtggacaacaaagacatacctacctcatagcacacagtgtgtcaccccttttatagtgtccatcacaccctactttatctttgtatttggatacctccctgattttaagctcctgcaggtcagaaggtgtttcctttttcatttttgtaactactgaaataactacctagcatgttttgttacattcagttttcttaattataggtccatgaattaagtcaaatgtgcttttcattttacaatggaaatctatatgtgtcctgaatatgtctgataaccatgacacagtggagtggttcaggaagagcattctcaagtgcaaggctctaactgggattgcagcactgaccacctgcttccagtactccagagaatgacacttctagtcattagaccatggctttgggaccattgcctggttttttctcttactctctcttattgggtatgaaaggattcagaatatgtcacccctcccccccagtatatcactgtggcataaggattattttgaggtaaaggcgattaaggaaaagcagacataggacaagctctctgccatcccccgtatgcctgaaagtcaagcataaattcctcttgtgaaggtgcctcgccactcactttccataccagcaaagggatagcaaccttataaatggagaggagatggcaccaagaaagagtctatacaaacaaaccttattaactagtctttatctgtcataagtttccccatatatttgccttcctacaatttgtcaccctaggagctcaaagtccttttcctttgttttatcacttctctacagaagtattgttccttattaacatgctaataaaccccaagtcccaagtttttgtttttctgagacagggtctcactttctcaccaaggctggagtgtagtggcacaatagtggctcattgcagccttggctttccaggctcaagtgatcctcccacttcagcctcctggttagctcagactacaggtgtgtgccaccatgattaattattgttgttattattataattatttatagagacaaggtttttgccatgttgctcaggctggtcttgaactcctgggctcaagccatctgcctgccttggcgtcccaaagtcctgggattataggtgtgagctactgtgcctggcctcagccccaagtactaaccactcctttgagttagtcattactgagtttctcccatgtgtgtgcatactacatgtgttaataaagttctgtttatgtttatcttgctaacctgtattgtctcagacttatttgcagggccccaggcagagaacctaggaggatagagggaataagtttttcttctctatgggtgattcatccaaaagaaatgtgagaaatcatgcattattaactagttaaatcggaagagtttcttttctcttattccattttatggactactttataactcagaaatgttttctgtgaagtgttctgttgggtacatgcttataatcccagctactcagtaggctgaggtaggagatcccttgagcccaggagttcaagatcagcctgggtaacacagcaagacgccatttcaaaagaagaatgttctgtgattgttctgtgatttattactgaatcgcaacaacaataaaaaaagtatttgggatttggggaggaagaggaggaaaagctcactgaaatgagtgatgcttttagggcttcaaaaatccctagaatctcttttttcatttcaccaagtagtgttctagaagaatcattttacctgatattgatgaacattctattctgaaagaatatcctgaaaaaaggaccagggcagaaatgatggaaattttgaatgcaaggatttttgaggggaagcatgaaggaaacatgagggatttttgatggggaaactgaagtacatgaccacttgttgtagtgccttgtacacagcattttgttaaacatacctaactgttttaagtgaaacttggtttgctcattaagataacatattttgctgggcacggtggctcacacctgtaatcccagcactttgggaggccgagacgggtagatcatgaggtcaggagttgaagaccagcctggccaacatggtgaaaccccatctctactcaaaatacaaaagttagccgggcatggtggcacatgcttgtaattccagctactcgtggggctgaggcagcagaatggcttgaacctgggaggcggaggttgcaatgagctgagatcacgccactgcattccagcctgggcaacagagcgagactctgtctcaaaaaaaaaaaatcatattttaattattacatttaatacatagtatatatgattttaacttctttttgtgagcatcagagccaaaccatacagttccaaaatcattttgattaatttttacttatttttactggaatctttttgggcaagtcctgtttctggtttatgtaagaaaaaatgcttcagctagtacttttcaagaccaagttagttgagtggaaacatcttccctaccctttaaaaagtcaactagaaaaaaatcctataacctaagaagtcactgaattcttcattcacatttaagagcaattcaggatgttcccttgttcttaaatgtgaaatgtctatggcagtgctgtacatagcagtagcacagtcctatcaaacaaaatttaatgcagaacaccagtatatatacaaggtaaaaatggagctgaggggagtgtgtgtgtgtctaaatgtgcgtggtgttgggggggtgtgtgtgtgtggtgtgtgggatgtgtgtgtagggggtgtgtgtgtggtgtgtctgtgggtgtgtgcaggagggtgtggggggtgtgatgtgtgggggtgtatgtggtggtgtgtgggcgtgtagtgtggagtgggagtgtgggtgtgtgggggggtgtgtggggagtgtgtgtgtggtgtggggtatggggaggtgtggggggatgtgtgtgtgtgtgtggggtgtggtgtgtggtgtgtgggtgtgggtgtgtgtgtgtgtttagggatacagtatgaaaggcccagaaccttttccttcttatggcctccctcttccagctgaacctatcctcatcctaggcagtacatcaaacatttactccagaactttaggacctgaaatttatttgtatatacgtaatattctatgcttatgatcattttacattaagatctttactttgcatagttttttgtttttgtttttagagatggggttccactatgttgcccaggttagagtgtagtggctgttcacaggcaggaacgtagcacattagagcctggaactcctgagctcaaaggatcctcccacctcagcctctggagtagctgggaatacaggcacacactactgttcctagctctactttatttagtttgttaagaaatcattttagcactttgggaggccgaggcaggcggatcacaaggtcaggagatcgagaccatcctggctaacacggtgaaaccccatctctactaaaaatacaaaaaaaaaaaaaaaaaatagctgggtgtggtggcgggcgcttgtagtcccagctactcgggaggctgagacaggagaatgatgtgaacccgggaggcagagcttgcagctgagatgctgccactgcactccagcctgggtgacagagcgacaatccgtttcaaacaaaaaaaaaaagaaatcatttttggaagagataaaaggcttgacagcaatatataaatatttcatttaaaataacttgttaaataatacttaaatgttaaatttcttaaaattcttgtttttctgagattttggaaaaacaaaaccaaataatatattgttaagggaggcagaatctcccttcctatttctttaagctcattttcataattaatctatttatttaggcctacagacatacatcaataaatatgtttctatttggttatttgtagatatgtaactcttatttgtcagagtagaaaactaagactcacaaaatacatgctctggctctcttagccttgtttctctttgtaccatgctataatttgtatggagaaaccagcctggtacttaagagagcaactacagaaccacagaatcaagatgctgaatatggattagttaattgttaggataaagttaagagactgtccctatggtgatttggtcattttgccttcatttggctacaactgattatttattcacaacaagtaaactaatataacacattagcactaagattgtaaaattttgaactatggataatttttatattactggggaaggattaatttgaccagagatttatcagaacaatgttttcaactattagctgagtgtttatcaaggtctgtggcatacaaaagttatttttgctttgagaatttcaattctaatagttctttaaatgtatactcttaatacgtgttaggtttttattatttatcatattgcttgtttacaaaaatcttccttttaatcatggccagccttcccagaatcctgaaatgcttcttgtatttgcattgcaaagagtcattattattgcataaacacttcaacttgagggtgtgtcatttcttggttgcttggtctttggctcttctgtccatactctatcattttaccctaatacctctcttctgtagcggtttcagtcatctaataaggattggaacatcccactttaaatccaagtataagatctattctcgttgttagaaagcaagagtgaataaaggtcagctgttcagatgactggctgtctgatttttttctgtgagcgtcacatgttaggaaaagctagttcatctctctgtggcttaggattcaacagcataagctgtcagactaacactgattgaaggtagactgggagggggaagcgcatctgtccaatggctcgccattggcttcttattacagcattctcccctgagacacactctgcatgctcattcacctacctcctcctcttccctccccttccttccctaccccttcattactgattcacagcgagaggcagcagcagcagcagtagcagcagcagcagcaacaacagcgctgcttgtcacgaatcgaggattgcaatgagctcatcgttttctccttgcagcttcacaactgccctggcttcctggctactgctgctgctgtcttctcacacatagacacgcacacacaccctttctcgcacacacacacacacacacacacacacacacacacacacacacacacactctcacacattctcacatgctagacccttctaagcagcttgtccgtttttacacatgtatctgaactctcctgcatcactcttggccattttctcgcattcgattgcttttgccgttttttatttagatcagtacttgatttcattttcattttccagtctactttggggttctcgcagtggataatttagccaaaatgtttttcttgtggagacattagctgacaattcccaccacagactggcttgtacgtcctcccagggagacctaaacctggctcccctcccaccgcagttcttaatattgtggataagagatccatctttctcattctggatacctacttagtgctcatggaagaaggggtgccctgcccagccccagctgctaagctcacacctcctgtcaaaaagtcccaggacatgcacgacgagaggagcaagctggtgaatgagtatgcgtgtcgagtgctggaacttctggggatggggcatcgtctgtttgtgcctcggcttctggcggtgagattgtttttcattgaacttcatttgtagggaatctgctatcctctgtgaaaattccttgtatctctgaaagaggcttgttgtctctggttttcttctccttctccccattctgccgagaaggaaatgctgagtggccactgttgtgcagctcatttggagcctggtccacaccaccccttaattggttagaggagatcatggctcttttctcagagcccagggtcacattagtggcattatctctgtggcagcaaaaaaatggttttctgcctggctaggctcagcaataaagcagaatacccaagtgcttgatgtaggcattctgttatgtatatctccaaagggttaaattttacaacagacatagcaacttatctagactgtgtgtggtttgctttctaacctccccattagattgccaatttgattgttgttttgttttgttttttgatagagaattttaccacctaaaaatactttggtaggaaattttaggtttctctcctagaatgattgaactgtttatctgtgaaacagcttaaagctgctggcttctgtgctgtgaatctgggaagtctgacttgcttgttatttgatttcctgaataagagaaaaatcacccttcctcatttcctaccaagggttaaaattaaatacccacaatcgctgttgcaggcttgagaactatacctagcaactattctataaggtaattggtttacagtagtcctataccattatgtggtaatggaataagaataatttagccttgtctgttttatagaatggagtttaataccattttagactatttcctcactatggttctctcatattagagtcttttcagtacagtatttacatgactgaatttaactcttttctctcctatatctcccttcactataattcatctctatttatacttatctttacaattactagttcagtctttatgtatgtatttacatgcaaatataatctcttctgtacaatcataacagacatgttagatagccatgtaaataagaaatttcccatcctaaggaaagtctatttgtcattccaaaacaaagtttgatgcagtgactagcatacaattataggggggatatttttgagaaatgtagttcctttgtcatttaaagaagaaataaaaagagctgaagacatgtgttttaatgtccaggtgaagtcattacttccctgaacctcatctttttcttaaaggagaaaactaaggattcatgattctatttagaaaggagttttgttttgttttgttttgttttgtaagtgaaatgagaagcattttatttcaggagttttgatattgtgaagtgctaaactatatttcaacaaattctctacatctctgaggaatcaggcttggtctaatatatttctgcatcctaaagactactcaactttgtgactcaaaggcttccaatggtaactttccagtaatttggtgccacctctctttggcatttacattttcagtgttttgaaggaaaacataaattggtaattaagaatattttgcatactcaactctgcattagggatgaatttaaactgcctctagtctgaaaaaattaattagcaataaaatccacagggagttgggttctcaagcttgagctctttggaggtcatgtatatctgtgtattgcaattgtaccaactctggttggttgccaaattaggcatctgaagtagtgcatctctcaggtggtcttgagaccttacttaggctctatcagttagagcctaagtaataatgccacctgcattatgtgtgaaaagcatatgctaggccagatgcagtggctcaagcctgtatacccagcactttgggaggctgaggcgggcagatcacctgaggttgggagtttgagaccagcctgaccaacaatggagaaaccccatctctactaaaaatacaaaattagccgggcgtggtggcacgtgcctttaatcccagttatttgggaggctgagacaggagaattgcttgaatccgggaggcagagattgcggtgagctgagatcgtgccattgcactccagcctgggcaataagagctaaactccatctcaaaaagaaaaagaaaagcatacgctgatttatcttgggggccacttgaaaatctctggctttgttttacacagttgcacttgaaaaattattggtaatacgagggtactctacattttgggaaattacaagttctttaattagcaatatggctgttagttgggctctgctattcagtaagttactgctcaaagtttagcatgtgtaccagggggaaattgttcagccttgtgttattgaactggctaatgatgtgggatcaatggctaatctgcacaggacactcctaagaggaatcctgccacatgcagtattgcaatcttttcatttctagtcaagaggaagtactaaagtgtaaaacatctctttacctttttagtcatgtttcaaacatgaatgcttgtgggttaagcacatacaagtactttattttacttttaagatcccattatttttttttcatcataaaaccagtcatttttcaaaaaaatcaaataaatgaagatttaccaagatagtgttgtggatttggtctctgagccttattacttattgttccctgattcacagagggatcgtcaaactactagaactctaggtttctttaaccttcagttggaaggaggttactgatataatagaggatgcacatttggaatttttgcttgttacccttcaaaggtacacccagttaaggacaattttcctttaataaatcaggtgcaagcatgtcattttagatattaccacaaggcctaaattctatgtgtacattcaccaaacatgtttttcttttgtgaaattaaaatactgaaacaggagatgcaaacatcctagacatcagctaactggtatttcccttttctaaagcctgtgctttcaaatgattctcagacctccagaaatttttagctgaataaaaattctgttagataccataactaaaggaaaaagaagccatttaggataaaaatagtgaagataagaaagagaatcacatttagattttttttttttcaaatagtcccctaaaagaatcaaacatagaatctgctgcttattagaggcccttaaagaaatatttattcaagaatagtgagaagtttggaatagaagcatctggagctaatactcaaacagtggaaatatttccacccaccctacctctttcaaaaaaaaaatcaggccaagcgcagtggctcacgcctgtaatcccagcatgttgggaggctgaggcaggcggatcacctgaggtcaggagttcaagaccagcctggcccacatggcaaaatcccatctctcctaaaaatacaaaaattagtcaggtgtgggggtgggcgcctgtaatcccagctactctgggaggctgaggcaggagaatcacttgaacccagaaggtgggatgcaccactgcactccagcctaggtgacagaatgagattccgtctaaaaaaaaaaaaattcaccttaaaatatgatactcttgcactgaatttttcagtgggaaaaacacattgaaaatggtatcagtggtggcatgtggccagagtccatactctgtaagtgtgtgatatttggagaaggaggagaaactttgactttgcttatattcaaaatctccccttttccctgcggatgttttttttttgtttgttttgttttgttttgttttttgtttttttttttgagatagggtttcagttacccaggctggagtgcagtggtgtgattttggctcactgcaacctccgcctcccaggctcaggcaatcctcccacctcatcctcctgagcagctgggactacaggcgcccaccaccatgcctggcttatttttgtattttttgtagaactgaggtttcatctcatctctacaaaactggaaaggctgttcttcacctgggaaattcttgccaacgctggtctaaaactcctgagctcaagcgatctctccagcttggccttccaaagtgttgggattacaggtgtgaaccaccgtgcccggcctccctcgggatttttaattttgctactatatgccataagaagttatcagatcattttatgttaaaattagtgttatctggagtttgaatacagctactcattttccacagtgaatcgaaggagggttgattatacatacacaaatgatctagctgtcccttttcgtagccattttaaggtttcattttggtcaaagtacttatgctgataaattgcatcctaatcttgtttgtttttaactttgtagactttcttaaacattaagtttaaggaaggatgaaagagcagaggagaatatgtcttccctttttacctctgttgttaacagctgcaaggattgctctttaaagagaggttacaacttataacagaagttaaaaacccaaatgcagaagttgccatgtatacttctgataccccccaaaaaatctaaaaatcaatttttatatgaaaataagtcctaaatacactccataatttccattgtatacatcttaacttttgaatattggatatgcttgaagtggagccttaataaattcatggaacaaatttatgtcgatatctattatgtgtcaggcaatttgcttaattcatatcactggggtaagtgcaaaggatacttacattaacattctacttacctttccctctggatatttcttcctacctacttgaaagggaaaagaagtaggacttgtttaaatgactttacttttatctttttatatagttctatgcaaatgaagaaagaagtaatgtcacctttgaaatgtaattggtaaacatggttcatattatttaaaaggatttgtcagaaagctcagggagcaaaagacggttgtgtagtagagccactaatttcaaaaagttatcctttattagttcttattttattttatttttggagacaaagtctcgttctgttgcccaggctggagtgcagtggcatgatctcggttcactgcaacctccatctcctgggttcttgcaattctcctgcctcagcctcccaagtagctgagactacaggtgcgtgccaccacgcccagctaatttttgtatttttagtagagatggggttttgccatgttggttaggctggttttgaacacctgacctcaagtgattcactctcctcggcttcccaaagtgctgggattacaggtgtaagccactgcgcccggcctattagttcttatttaaaagctggtagagttattttctttattttccaagggaaggaaacatgcctctgcttattgaaattgtcgaaatcttattcgtattatcttctggctaacattacttaactaatgttgggaaaggagttgcattttcattattttactcttccctcgccattgttctgaaagcaatatagaaaagctctaacaatttcccagttgaagaacagcctttccagtttaaatcagtttttctagcctgaagggattttgttcagtgagcacagatgtataattgtaaaccagaagccagcacaacctattttgggtacttggtttggtttttgaagtgttagtctgccttttaggggtacatttttaaagcatagatcttatgatcgcaagatcattcgttaagcctcttcattgtcagggtaagggtttagtattcatacaattataaactcaattatgagcactaattatctgcagagccagctcattaataattagtatgtgtgcaggcatggtagctcactcctgtaatcttagctactaggaagactgaggcaggagaatggcttgaggccaggagttaaaaaccaatctgggcaacatagcaaaaccccatctgtaaaagaaacaaacaaaaaaacaaatttgccaggtgtggtggtgcatgcctgtagtccaagctactaggaaggctgagacaggaggattgcttaagcccaggagtttgaggctctagtgagctatgattgtgctaccgcacttcagactggatgacagagcaagaccctgcctctaaaaaagtaacaacaataataacaataattagtgctaggatggtgagatagtagcactaggatggtgagaactggttctggagccctggttgacaccatgttttattttcataaacagcactactacttgtattttagactaattacattacattaatgcttgacattcataaagcttatttatttatttattttgagacaaggtctcactctgtcacctaggctggagtacagtggtgcaatatcagctcactgcagcctccatgtcccaggttcaagcaattctcctgcctcagcctccagaatatctgggattacaggcgtgtgccactacgcccggctaatttttgtatttttagtagatacagggtttcaccatgttgaccaggctggtctcgaactcctgacctcaaagtgatccgcccaccttggcctcccaaaatgctgagattacaggtgtaagccaccatgcctggcctgtaaagcatatatatttaacaaaataatatgtataggtgattcaaattttgttaaatatgtgtaagatatgtatgtaatgatggggtaaaggactataaataatgtaataaaatattaattatgtttatctctgtagtcagaccttatattaggcttttaaaaaattttttattttgggccatgaatatgtaatcaagaaaaagtttatgaccccaccatgtagacaatacacatacatatgtacgaattatgattgaaaaagtattcttttaaaaaaaaagccaaacaacttttgataaattcttagtgaaacatccaaatctttgcagaacaagaaaacatccaatctttgccgagcaagaagtgtctatcccttgattgtagagggaaaaacctcttagatacagttgtcagcaaatgaagagttatctctgtaagcttataatctgcttatggcattacaaaggcatttgaggtaatacttaatgattatggaagtctctcgaagatagaaaattggaggaaaaaacccatcagaatcaaagtaggactaactacaggttgtcttctagaatactggcagcaaggtttttgttttatgtgttttgtgcttactggcatttttgttttcgttcacaatgaaattagctgtattgcagcccataagaaaaatataagttcttccaacttagactgcccactttatggaattaaaaatatcagtgaggccaggcacagtggttcacatctgtaatcccaacactttgggaggcctgggtgggaggactgcttaaggccaggagtttgagaccagcctgtgcaacgtagcgagacccccatctctaccaaaaacaaaacaaaacaacaacaacaacaacaacaacaaattcttttttttttttttttttgagatggagtctcactgtattgcccaggctggagtgcagtgcagtggcgcgatctcggcccactgcaagctccgcctcctgggttcatgccattctcctgcctcagcctccccagtagctgggactacaggcacccatcaccatgcccggctaaaattttttttgtatttttagtagagatggggtttcaccgtgttagccaggatggtctcaatctcctgatctcgtgatctgcccgtctcagcctcccaaagtactgggattacaggcatgagctaccgtgcccagccaaaaaagaattcttaaaacgtagctggcatggtggcacacgcatgtagtcctggctactcgggagcctaagatgggaaggtttcttgagcccaggagttcgaggctgcagtgagctatgattgcaccatcgtactccagcctgggcaacaaattgaggccctgtctcaaaaaacaaacaaaaaattcagtgagagcaaggtactgcttttagccactaagatatctatttttgagcatatttgagcaacacagatgctatcaccccttatatttcttttggaattcaaaaaatgcactcttataccttaaattatttcattctcaaatacttgtttttttggtgtgtgtgtgtgttggtttttctttctttcttttttttttttgagacagagtttcactcttgttgcccaggctggagtgcaatggtgcagtctcggctctctgcaacctccacctcctggattcaagcgattctcctgcctcagcctcccaagtagctgggattacaggcatgcgccaccacgcctggctaattttttttatatttttagtagagatggagtttcaccgtgttggtcaggctgatctggaacccctgacctcaagtgatccacccgcctcggcctcccaaagtactgggaatacaggtatgagccaccaagcacggcctcattctcaaatacttgtgattaaagatattcccattttttaaatgggaaaacttacatagcactacaagtttgccaaagttgaagttaaaatgaatttattacatcctttgcaaccctgagtacctttaatgtgtcaagtactccagaggctgaggttagcaaattgaataagatgcagttttcacacctttgtatacttgagcctccctgccccatggttgccagatctcttctcttcttgagcttaactgagctgggcaatccatgtgatttgcagcaatatcaacaccaacaatgtctaggaaaggacagccacagggaactctggcttctcgtgtccagagacttaacctgagttaggcttcagccccaccctggtgggaaccccattgctgtaccctccctgaggctattagcctctcttaagcagcatctctgcctacatggccatccctgcttgactagaggtccggtgtgtgagaatgtaggattcctcattcttgataccaatctatctgcttttgtatgtgctaaaaggctggatttgaaattaggccttggcaatattagaaaattagataactatgctactgtctgcagagaagagatcgcccatcaccattttggggcatctgtttccaggtaactagaggttaattgcattgaaaatagaagaggtgccttcagaggactttcggtagtgaggaaagggttaatcctgtttctccacaaaccctggaagcagtttgtctggaattgtccaaaccactaccagagagctaatcatcagaactggtattacatgtgaaaaacgaagcctagggatgtgtggtacatctggtagaattggtagctggatgctttcccccataattcagccgttgatattttagttagagaggctctctctcagactgaagttgtttccagtaactgccttttccagctaagttaaggtgagttgagagcatgctaagcattctccaccacttgttgctattgcatctgtatgtttatgaggaaagagaaatctgagatgtactggagttttttgttttttcattaccactgttagcctagctccattttttgattactaatttgtggacctttgtgaaactgcctggtatgaatatgttcttttctttcacatttctgtttaaagggcaggggaaaagggaagcaaactctagcaaaagagagatgaaagtagatttcattcatttattctgttagaaatttgagtgcctcctatattctgggcattgttcttgttgctgtggatgtagcagtgtgaaagacagacaaagaggggaagaaggggagcagatataaaactggaaagtgaattggtggggaatgggctaggaggaagaatttaagtgctcagagaaggtctcactcagatcttatattgagctaaaatctagattacaagatgttgctaggattggactacatgtcttgctagtcatgataatgacttggaccagggtggtgatgacgaaaactgagaccctgttacaagcaggaatttctctggcttcctgcctactttttcagtgcagtctttaatcagctttacattttaatttaaataaagtaatattttgacacagcatgtagttatgtgatttctgggtgcttttttaattgttgaagtttttgactattaagtactgactgtaaaacatctaatttgtttttggcttctgtgtactcatcttcctaaatctataatatgtatcacagtgtttgccaaagttgtttatagctgtttattaaaatatttattgtctttcttattataaaagcgttatacagaaagtataacaaaatgtaatgaaaaaaataaccttcaggttacagtgacccatgcctgtaatcccagcactttgggaggctgaggtgggaagataccctgagcccaggagttatcagcttgggcaacagagtgagactcccatctctatttaaaaaaaaaaaaattataagtagctgggtgtggtggtgtgtgcctgtagttccatctactcaggaggctgaggcgggaggatcacttgagcctgggaggttgaggttgcagggagccatgattgcactatgcactcccgcctgggcaacaggagaccttgtctcaaaaaaagtaaaaataagtggtataacccatgattccactatacagataaacattttgttttctttttagtcttttttctgtgcacagatatatttatttccaaatggttttttagtttttgaagaagtaaatttggtaaacaatagttttcagaagagatcagtagttaggtggtttgtttcatttactttttcatagcattcttcaaggtatgggatcaatttcctattcttttcacttgaactgctgctgtcattagttgaaaagccatcttcccattaggtgtttattgtgtaactgatgtattttggttgcattttctatgtcttcagccagctttttaataatatccttaaaatgttcattgagctgaagtcacagattagtcctagagtccagtttcttttccttttttagccttattcttttctcagagctgtaacttggtaagctttgccaggaaccatcattctaattttcaggtaatatgaattcagtatgttagtttgttcattaactcttagattgcttctgtgatttatggtgatttatttcagcttatagtaacatcatctaaatattgaaatgttagaaatatcttcttaaaatgtttggaactaacttagatcttagctataaaagtatattcaagaaaatataaattctttttgaaatatatttgtcctcaaagcaggctgaaatgtaatgacgattcttgatgattattttgcagacctcaaaggaagaccttctgcaggctgattttgaaggtgctttaaagttctttagagttcagcttccaaagagatacagggcagaggaaaatgcaagaagactgatggagcaggcttgcaatattaaagtaagaacatgagtttttatataataaaggtaaaatatgagtgcagaataatatgacaaattatgtaaaaatttttttatatgttgcaaggtttgattatgtttaagattagattgtgtatgaactgatttctcccagatgtgtttgtcaggctaatgtgtgtatagtagctgtaccttctagtaggacttaaagttggcaggctcagattataacaataggaagataaacatttatctcataggtggggctctagagtgggctgctgtgatagtggtttccatggaagcagacttagtatttagcttttgccatctgttttaagattatttaggacaaagcaagaaaagcttgcttaggcaatgctttcatttctctaagtgacttggaaagtttgagtcttgatctgcccattcccatcccacacctgccaaatatctgtggatacattggtccatgtcacatgtctgataaagctaaacacattttataaatcaatttgaaattgaaaactctttccagaaagttgtagtattaaggtgagagagcactcttaaaatatttggaaccaatttactgatgttaattcttatacctctacaatataccagggtatctttttacctaaccataacgtaaatataaattgttttcctaaacaaacagagatcctggtcttagggactttacattcttgcagaaggaaacagacaataagcaacataataaatacattatttatttaacatgttagaaagtgataaatagctgtgaaaaaaaagagagtaggggaagataaagggaggttggattagtgggggagcaaaggttatgattgttattagatagtcaatgtggacctcactgagtcaatgaaggagatgagagattagtcatggagatgtcctggggaaaagctttctaggcagagtcaatagccagttcaaaggtccagagactgcctcatgcctgggtgggcttgagaaacaggaaggccagtgcagctggagtgaagtgaatgaaatgggagtagtaggaatgctcacaaagagccagaaaatgtaggccattgtaagcatttaggctttactttgagtgaagcagggagctcttgcagggtttttagtggagcaatgatatgatctgtctgaggtttttaaaggatcacaatggctattttgttaaaaacaaccataggaaggtaagagaagtagggacatcaaacaggagattttggagtaatcctcttgagagatgatgatagactgaaccagggtgttaacagtggagatagagatggagtggagatggagatggttggaacctgagtatttttgaaagagaaccaataagatttcctgatatattaaatgtgagtgtgaggagaaaagaagagttaaaatgattgcactgattttgaactacgcaactaggagataagagtcaccatcaacttattaagcatattacttaaaaggtactttgacacagacttcttttaggcaccagagccactgtaacattttttggtataacacaatctttttaaatttaaatcaaattataaatgttaaaaagtacagttaaaaagtacactgaaagtaagtaactgggcagaaaaaaattattttgtctttcaagtgagctttatattcaaagagatcattttccaaagctatcataagaaagatggatttctgaagttttcattctgaaatgcaaactctttaaagccttcacgactgattgttttatttggccaaagtgtaagccacatttatttgtaactttgaaagtatactctagtgggcatgatgcctttgactgaattttgtgggtggtgagtttgaaaggtaggcttcagccaactgattgtttcggagatgccagagagaagtattgtaaattgggtcaatgttgtaggcatcctttaaaataaaatatttatttctaagaataaaagagtagagaaataagaggtacaggtaaggtgaaaagttaaaggttttcaagggaaatctcagaggattgccaagtcactgaggacaaaagaaacccaggaaaacaattgaaaaacatgaaatgtatagggaaaatttttttctccaatataatttatgaagttcctggaggtggctagttattatcaatccagaaacatgggatctgagagatggagaagcgtaaaatgttagaaaacaagttcaaaatataatccaaatggactgctcctggaagggaagtgctgggtacaaccagaataaattttttggacatgaataggtaaatatgaatatttttaaagcttttaataagatttcaataatttaaaatttttaataatttaataatttgtaaagttttaatagttttttgtggggttttctttgcattatctaaggagaatgcctttttcttggatatttaagacggtatccacgggacaccatttcatttataacatataattgtagagtgaatgattgtgaggcagatgtgaggtgaaactgaaagaaggaagacataagtcatccagtattgggctgggattgtgctgggactagaatgtaggtctccaatccaaaggtctaaaattgtttttaaaccaagacctatattttggttgcttttatgtcaagaccatgactatatgtacgtacttacatacacataactgaagagatacttacccttacactgaggcactctgatgttttttgttctattgtattgtatttccttttttttttttgaaatggagtctcattctgttgcccaggctggagtgcagtggcacaatctctgctcactgcaacctcccaggttcaagcaattctcctgcctcagcctcctgagtagctgggactacagtcatgtgccaccacgcctggctatttttgtatttttagtagagacagggtttcaccatgttggccaggctggtctcgaactcctgaccccaagtaatccgtccgtctcagcttcccaaagtgctgggattacaggtgtgagccaccattgcccaacctattgtattgtattgtattgtattttaaacttctccccggatcccaagaaaatccccaaaccaaaaggctgaccacaacccactaaatcgattttacaatagcttgtagttttgaaaaaacactaagacctatcccactgttcctaccacctccccgttccccactctgatctgccacaacccatgagaggctgtagatgacgaggtgttacaatgaataatggaagtgcatgtgtaggtaaggatgtgagtcatcatgccatcattacagcagcttgtgctggcagttggaaattttaggagatgatggacttatagactgagacttatgtgttagacaaagcattcatggacaaaggtgactgcaggcatggaataggcaagaaagtttaactccttatccatagcctatttaagattaaagatagaatttctgccaaaagtaatcaagttttaaacatttttaaattattttcaaagttggtgttgtatatagttgtgtcttttttgaatggacatgttcccatttaattaccccccaaaataatcactttcctttaattttaaggaactgtaaccagtgatttcagtgaaactgaaactggctttaaaatagatgcagcagttgcaagcaaaaaataacttgttagctctgtatgtggtttatttctgtgagtgtaccaacaagatttgttaataaagcacattagattggataaataattttatttttccaaaacttgtatgacattaaatatcaggaacattttcaatagcttctaaactggtaatttaactaatgtgactccaagttattctaatacccttctgttcctatggtttcaactaggccaaaatcagaaaacatattgacccatcaggctttactttgaacagtcatttggttacttttaatattgaaatcaagacctaaataaaagatgtttaaagtgcctaatatgaatatcctgtattttcccagggagtcagtttttattaaatatcatactttgatttttgccttatagttaaaaatgctgccattgcagagcttcttaaacttggattttggcttcagagactctgaattaccagaaatttgaatttctttgtatgaacatatgagcattttgtttttcttagtaacataatacatagcttttttttttttttttttttttgagatagagttttgctcttgttgcccaggctggagtgcaatggtgccatctcagctcactgcaacctccgcctcccggattcaagcaattctcctgcttcagcctcccgagtagctgggattataggcatgcaccaccacgcccagataatgttctatttttagtagagatggggtttctccatcaggctagtctcatactcccgacctcaggttatccaccccccttggccacccaaagtgttaggattacaggcgtgagccaccacaccaggcctcgtaatatatagctttattaagtgcatatacacataatctttataattcttgatctgattacctgtttttctacatatttttattcaataccatttatattgtatcaggttgaattgatgaaattaccattcctgttggtcagaaactgtcaggtatttgattggtttatgatttatgattcagtattttatgcctccttacagctcaaataggtgcatatgtagcttagctctatggccatgtaaacttttcctgagaattattctccaaaggctaagaaacaagtcttttttttttttttttgagatggagtcttgctctgtcaccaggctggaatgcaatggcgcgatccctgcctcctgcaaccttcgcctccctggttcaagcagttcccctgcccagccttccgagtagctgggactacaggcgtgcgccaccatgcctggctaattttttgtgttttagtagattcagggtttcaccatgttggccaggatagtctcgatctcctgatctcatgatccacccaccttggcttcccaaagtactgggattacaggcgtgagccactgcactcggtcagtcctttttttttgttttgttttgtttttaagttgatttttatttggaataatgttccaagtaccatatttacgatggacttcagtagtagcaaagttcataagcacaatcatccaaaattttctgttggtagagctttataatagagctttttaaaatatgttagtttatttcacttgtatttcattagtaaaataatttgagcaaaattaaaaggcaaaatctgacattaacctaaaggaagaaaattaggaaagaaaagttatttattgagtgcctgttgtgtcccaggaactatgccaagaggacttttcagaggaagtaagagttaaaatgaaatctgaaagattattaggagttaaggagtgtatcaaggcagggagaaggatgtttcatgcagacaatatgcagaagcccataggtaaaaaaaatatggagttgcccaagacctgaatgtaggtcatgactggagagtaggttgcaaggagggagaggcagttaggggagtagatagagaaaagactagagaggtaagcaggagccagccagcttgtgcagagccttgtaaaccacggtaagcaatttggattttatcctgaggggagtgataagcactgaaggatttaaaataggagacataaattatcaggttattgttaggaaggtcattctggttgctgtgtgggaatggattgaaagggttaagattcggtattggtgacagaccatttcaggagctgttgcagtcatctaggtgagaagagaccagagtttttgtaataggctgaagaaattatggatgaattccagagacattcaagacataaaattaacagattttagtgattacatgtgagcctcagggcagataaagagagccagcgatagcacttaggattcttacttaagcaacttggtggaaatcacactgagaaaggaaacaaacaagagaacaaattataagcactaaagataatgagttaacttttgaatatgttgttcgtggtacatatccacaactcatatccaagtagatataaatatccaataggcaggtggatactgaagtgagatctgagctaaaagtagacatttgggagtcatcagcattgaaaccatgggagtgggtgaattcttatagcggagtatatacaatgagcagagagaagggtggaggatagatgcattcacatgtaaaatacagatgagggaatagaagctggtgagactagaaggcaggaagaaacccagaagagtatgactgtgaacactaagggaaaaggtgtttgttttcaagaaggaaggagttgaacaagtgtcagtggtacctagaggtcatgtataaggtactgagaagtggaaagtagctattgtgcaatatttaacgaaaagacatccttaatggtcttaatgaaagtagtttcagttaagttatgacaaataaaagccaatgattcaaggaataaatagcaggtgagtaaatagagaaatgaagatgagactgtttttctaagaaggttagtatggggagaggatggaaaatggaagagatagccggtaattggactgagcatggtggctcacacctgtaatcccaacactttgggaggcggaggtaggaggatcacctgaagtcaggagtttgagagcagcctgggcaacgaagtgagaccccatctctacaaaatatttgaaaaggctgggtgtgatggctcacacctgtaatcccagcactttgggaggctgagacaggtggatcacttgagcccaggagtttaagaccagcctgggcaacatggtgaaaccccgtctctaccagtaaaaaagaaaaaaaaaaattagccaggcatggtgacatgtgtctgtagtttcagctactcaggaggctgagatgggaggattttttgagcttgggaggcatgggttgcagtgagctaagatcatgccactgcactccagcctgggtgacaagagtgagaccctgtctcaaaaaaactccaaaaattatctgggcatggtggcacatgccgggagtcctagctacttgattggctgaagtggaaggttggcttgagcccaggagttggaggctgcagtgagctatgactgtgtcattgcattccagcccaggtgacagagcaagactctgcctgtctctaaaaaaaaaaaaaaaaaaaaaaaaaagagatagtcagcaagcctgagagtaagtatgggagagagagagatgagtaagtacaagagagagagataagaggatgttgagactaagatggatttttggaggatgggaaagatgagtctttaatgctaaaaaaatttccaatgactcttaatttcttctttgagcacctactatatgccaggcattgtaccagatagacccagggaatatgagattgagcaaaagcacatatgctctcagagctcatggaattcacagtgttaatttaatcaccttaataaatgtatacttacagagtgagataaatgttcagaagagatataataaagatatatgagagcaaagagcaaaggaacctgaccttgactcaatgatctagagaaagcattcttgaactgagattacaaggtattccagactgaaaagcagcatatgcaaagcctgtgaagagggagagaatatagtaagttgtagaaactaggagaaggccagtttgactgtacttcagagaatgatgacagttgatatccagggaccaaaccacttcatctaccaataagaaggaaaagcccacagaaagagaaaagttaaagattaaataaagaaagggaaatatattaacaggaaaaggactctgaggaggtaagggattaacctcaaaagaatggacctttcattacaagctggagggaataggcaagggaaggatggggaaaatggtgaatgtgtagtttggtgaggaagaaattgaggatatttcatttgaagttttctattgtttctgttaaacaggatctaggatgaagggaatgcagtaaagtgacagctttgagaaacatggaagagcttttagactggaaaaactcaaaagaacagctagtctatattgttgtagactatgagttcatagtggcaaaaatctacagtgttttgtaattttctttagaaacatttagtagtccaaatgtatatatgaagaagacagaaggttattttaaccacagttgaggtttgccaatatgaggcaaaggaaggacatggggccagggcagttgtgctaataaactgtatattgggttggggagtaagagggagtagagaaagaggtatccctgatttgtagcgtttgcccatttccatggtatgaatactcccaccatggccaaatttcaagctaccaatgacttaaccgccccactcaatttctgaatattaagagccacttttgagctggtagtttctgacactggtacaccacagggttgaggagatgaggctaatagcaggagagtggttgacatgatgggaaatggagtctaattaatagaaaagagagtgaagatagatgggactgaaagactacaagaaaagggcctgggagaagggaacaaagaattattggactcaggaagaatggcggaagaggagattaattcccttattgggggttacccaagataaaaagcatctttttctcaaaaattcatatattttaaagagaactttctgatactagaaagtaatattgccctgggctcgcccctgtaatcttagcaccttgggaggctgaggcgggcagatcgcctgagctcagggcttcaagatgagcctggccaacatggtgaaaacccgtatctactaaaatacaaaaatttccctaggcatggtggcacgtgcctataatcctagctactcaggaggctgaggcgtgggaattgctggagtccgggaggtggaggttgcagtgaactgacattgcaccactgcactccagcctgggcgacagagtgagactccatctcaaaaagaaaaaaaaaaaaaaactgccctgtgctcataatttccagtgatcgcagcaaaaccatgccaattactattttggcattcatggccacctcctatgatttacttctctttgtcctaataattctgccaccatcactaccattttactctgatcacatgattaagagttggaaatgcattgtgggaggaatagacaaagatggcagaggcagtgcaggtagcgggaatgagggaatgaggaagggcactcatggttaaaaacagaatcctgacccagcatcttctcacacaccaaaattgtcttcctaccccgtgctaaagaggtagctaccaatgataagatgttacttatcacctacttgcctcagaaaattctaagctctgctccagctcaattacctatatattgtgctggactattttctactctcccaaagttgcaaatacaatttgatcttacccctcacaaatcatgtttttaatgagacagtggtagattcctttatctagaatttaattttttttctccgaagacctccatattcataactggatttgaatgtttttgaaaataactttcacagtagagcaaaactgtaaagaacaattgcattaaaagcaatttacctctaatttcttcatgctgtttgctatttattcctggctgttgttgctgtacgtgaacaagaatgtactctctgaaatagaggctttctttgaattagcactgaggtcctacagaagtttttgtcaacttcatggatctaaaatgtgtgcttttatgtacaccattgaaaagattcacttttgattaaaacacatcttgtgttccttttctataaagacctctatatgttgacaaccacatttgagttgttaggtttagtgtcataatcttctgctggagaaatgttatcatgttataggatacagatgtgataattaacacattgataataaagctgggtgcggtggctcacgcctgtaatcccagccctttgggaggccgaggcgggtggatcacgaggtcaggagttggagaccaacctggccaacacagtgaaaccctgtctctactaaaaatacaaaaattagccgggcatggtggcgcacgcctgtagtcccagctactcgagaggctgaggcaggagaatcacttgaacctgggaggcggaagttgtggtgagcggagattgcaccgctgcactgcaagcctgggcaatggaacaagactgtgtctcaaacaaacaaaaaaaattgataatgaagtagtttctatatcaaagcatttgccactgtttgcctttgagacttctattaacactcatagtcttcagtgcaccttagattggggtattgttttgttttattcccagtgagcagggaacatgttaatgttggacatgttctgaaacagttgataacaggcagaggaaacaggtcagagctccagatgcttaggcatcaggcaccttccacatttaaaaaactcagcttttgtggcccttcctaatcagctagaacagtggtctcctaccagggatcattttcatggaagacaatttttccatggtggagggggagggcattagattctcatagacagagcagtctagatcccttgcatgtgcagttcacaatagggttcacgctcctatgaaaatctaatgctactgctgatcagacaggaggcagagctcaggccataatgcttgctctcccacgaggcacctctttctgtgtggcccggttcctaatgaccggtactggtccgctgcctggtggtagggacccctgagctagaacacatttgtcttctttatttgcttctgccattttgtttctaccctgtacctacttctgccagtcattttctggcagttcattaaaaagaaagccatacatacattttaaaattaacctgatgggtaaactaatggatataaaaattgatttatatttgggcaactcttttcttagaaaaacaaatagtaaaccataggaatagagcattatgcctttatagacgttccaaaattggaactatgtgcattccatgcataattaacaacaaaaagaacatcagaattgctatctcacctagtagtttatttttcttcaaaaactttaagttttctttttttccctgcacctaattcacgcccagcagtcttataatggatcaaaacctaatgattatgctcttaaataagagtttccatattttgtttacctttctgaagtgttttgccaattaccttttatccagtagttgtgatttatatctatcagagttgccataacgttagaacttgtcttcactattgggaacagcagtaatcaataattttcccgcaaccatttaccgtgattctacatttctttgaattattttatttatttattatcacttgaattcatattaacattatgtttaaagtgtgcttcatgatttgtatttggggatccgatttacagaagaaaagaaaacattcctctgaacccttgttgcttctcactggaaataatttcattatgttaggcaacaataaaaataaatgaagagaggttggttaatgagcacacaagcatacactttgatagaaggaataagttatagtattcagtagcacatcagggtgactatagttaataatttattgtgtacttcaaaatagaagattcaaaaggttcccaacaaaaagaattgacacatgtttgaggtgatcgatatcctagtactctgatgtaatcattacacatagcattcagggagcaaaatatcgcatgttctccataaatatgtacaattattatgtatcagtaaaaataaattagaaattggctgggtaagtggctcatgcctgtaatacttgcctttgcctcccaatactttgggatactttgccgatcacttgaggtcaggaatttgaaaccagctttaccaacatggtgaaatcctgtctctactaaaaatacaaaatttaggccaggcgcagtggctcacacctgtaatcatagcacttcgggaagccaaggtgggtggatcacctaaggtcaggagttcgagaccagcttggccaacagggtgaaaccccgtctctactaaaaatacaaaacttagccaggtgtggtgacacgtgcctgtaatcccagctactagggaggctggggcaagagagtctcttgaaccaggaaggcagaggttgcagtgagctgagttcgctccacttccctccagcctgggcgaaagagtaaaactccatctcaaaaaaaatatatagatatagatatatacatatctatatatatattagtacaaaaattagctgggcatggtgacacacgcctatagtcccagctacttgggaggctgaggcaggagagtcacttgaacccaggagggggaggtttcagtgagctgagatcgtgccactgcactctggcctgggcgacagagcaagactctgtctctaaataaataagaaataaacttaaatgaaacttaggtgtttcagataagttacattaggaaggttgggccattggatcctgagggtttagtgttctaaacacttaaagcacaactgttttagataccaatgcctgtactctggggaatataaaatataattatattagatttactgagtaatttttcatattttcatttctccaactcagatccatttaccttgcaaataactaaatctaattaatattctggagaaattgcttatttcactcttgggcctttttctctcctcctctctcccctactgttcctaaaaaaaaattttttttttgaaatggtggcagcaacatgtaaatgaccatagcaaccaaaaaaagcgaaatattttaaatgttgttcacatatctccaactgttgtttgtcaagccttctgaagttccacttaaagacaacaaactactgaggagaaaattatattccttgctgtagttaatagttgtgatcaaatgggcattcttttctcattgccaaaccctctgacttggggattttgttacttcaacctgtgagaggaacagagctattgctttcatctagaacatctaccttttgccttttttcttagcctgaggcacttcctacccaaatcattactgtatatgtagttaatatagtctcttttaaatactcattattggttttgcttttttgatttttataatgtgaaggaatcttggagtacaaacgacataaagaggtggtaaaacagtgttctgatagtagtttaggctaggagaagcgtcacgttctcattgtggcacaagttcaacagatttatcagtgtgttagcctttccaggcactgccttattctgttatccctaacccgtagagtcaccatactttctactaactcttgctacttttatcctgaaaagttttagctgaagtttcttacaaaattggttcctgaagaggtcatacttttgtttctgtttctcatgtctgctgttttacatctgcattcattttctagggatgccctaacaaaataaatacacactggaaggattctttactcaacttttattttagaatcgagggtgtggccaggcatggtggctcacacctgtaatcccagcactttgggaggccaaggtggtggatcacttgaggccaggagtttgagaccagcctggccaaaatggcaaaaccccatctctactaaagatacaaaattagctgggtgtggtggcgcatgcctgtaatcccagctgtaatcccaactcgggaggctgaggcaggagaatcgcttgaacccaggaggcagaggttacagtgactggagatggtgccgctgctctccagcctgggcgacagagcaaaactctgtctcaaaacaaacaaacaaacaaaaaaagaatcaagggtacaggtgcaggtttgtcacatgaatatattgcgagatgctgaggcttggagtacaaaggaatctctcacccagatagtgagcttggtgcgcaacaggtggtttttcagctcttggctacttcctgcctccctcaaatagtcctgagtatctgttgttcccatctctatgtccaggtgtactcaatgtttagctcccacttataagtaaaacatgcagtatttggttttctgtttgtgcattagtttgcttaggataatgacctccagttgcatccacgttgctgcagaaaaggtgatttcagttttctttttttctttttttggagacagagtttcactctcattgcccaggctggagtgcaatggtgcgatcttccctcacgcctctcgggttcaagtgattctcctgcctcagcctcctgaatagctgggaatacaggtgtgtgccaccatcctcagctaatttttgtattattagtagagatggggtttcaccatgttggccaggctgctcttgaactcctgacctcaggtaatccacctgcctcggcctctgaaagtgctgagattacaagcgtgagccaccacgcccggccaccacattttctttatccagtccaccgttgataggcacctgcttgattctaagtctttgctgttatgaatagctttgtggtgaacatacaggtacatgtgtctttttggtagaacaatttattttcctctgcgtgtatacccagtaatgggattgctggttcaaatagtaattcaacatttctttgataaatctctaatctgttcaccgcagtggctagagtaatttacattcccaccaacaatgtataagcattcccttttctctgcggcctcgccaacatcttattttttgacattttaacaaaagccattctgactggtgtgacatggtatctcattgtggttttgatttgcatttctctgatgattagtgatgatgagcatttcttcatatgtgtttaggctggttggatgcatagactgggaggcttaaacaacagaaatttgctttctcacagttctgaaggttagaagtccaagatcaagatgttggcagggttgatttcttttgaggcctctcttcttggtttccacatgggatggtcaccatctcattgtatcctcacatgattattcctctgtctatattatctgtgtcctaatctctctctgtctttgtttttttttaagagatggtgtctcaccatgttgcccagactggtgtgcagtggctagtcacaggtgtgattatagctcactgcaatcttgaactactgggctcaaacgatcctcatggcttagcctcctactgagtagcaaggactataggcatgtgccactgtgcccagctctaatctctttttataaggacaccagtcatattggattagagcccaccctaaggacccattttaacttaattgtctctttaaaggccttatctcccaatacagatactggaggtactgggagttaggatttcaacatattaattgggggggcacaattcaccccataacagtgttgttctcatagtaactgagtgcgcatttcttctcaatttctctgaaaacattctcttctgaacgtgaatcttgcttggcagctctgagctatacctccaatatcttataacacgtgacagtttcctatttttgtcagcatacccaacatcacccattttctcctaaactctcagatgatctaaaagatcctatttttttttacagctccaccctccacttctatcagcccacttggttggcaaggaattttctctggcatgcatgatagcttgttagaagttctaatttaccttacataccctgttctagtatggtcttgttgcattaactttcttataatcctgcttttatattgtatcctatgttatgcagaccataacctgccttattcctctcttttcctgaaagagaggcagtgaattgtgcaagtaagttgtatctttgcacaatgtccagtggtagaagaaagtctatattgtattataatagagtattttaagcaacaacatatgttgaatactatataggacacaggtacttagtttactttctagaattatttacataaaaacttttgtccctaaattttgacccaattttaggatggccattatttaagaagccagatggcagacattgcttctgtgaaggaaacattttgaagattgtctgacatagtaggatcttcttagagccatcagaatttgcagtttcaggttcctgacattgcttgtctggagtgctataactgtctcataactggtctctccggctttggtttctgtcccctctagtttcctctgcatgcgaccatttgagttgtctgtctggaaaactaacctcagtttatcactcctcagaggacactgaagctccctgttacctgcaagacaatcccacacacctcaggttggcacacttccctttcactcataccaatatgccatggccttgtcacatcctgtttctgctgcctaggttgctttctgtctgtggagtgcctggagaaggcagaggctttgggagtggacaagtctaggtttgaattctggctccagttcttactgagtgatcctgagaaagttacttgatctccttcgagtatgagtttcctcatcgtgaaacaaggctaatacctactgcacagagatgttgtaagaattaattaaattaaacacatgtgtgaagcattggctaaattaattccttgttgtagctatgtagtcaagcaaactcctatttaccctttaggttgcaggtcaaacatcacctgctctggaaacctaggctgttatttattctgactctggcaattcctacactagagcaccactgttggcgttaagaacgtggttttctgaagccacattgttggagtttaaatttagccttttccatttaattagtagctgtttgatctctggcaagttacttattgtacctcagttatctcttctgtaaaatggagatcctattttctatgaaataggattgctatcaagattataaataggataatataaataagaaacttggcacaatgtagtccataattagtgtacaaccaagatagtcattatgactctagtttctctcattgtgaggtcctcaaggctgtgactcttccttgcccctccctagatgcctgaaccaacacctagcatagtagatgaatcaaggagtccatctactatttatttatatttattgaggtaacaaaccctgtttataaaagatgaagaatattgggctttgcattttccctgaaaatacttctggtaataaacaggaaaatcctcaaatgttacactgagtggtattccaggtttattcctatagaaaaatgaaataaaaagtgaaatctgtctgaattttgcttttaagagtggtgtttattatactgtgtagcttagagggctcatgcaatataaatttgtgaattttccaccattccagaccgttaagacttagatagaaggtcatcattcttccttgatgttgtggataaccagatgccctccctcatccctattagatttttttggattattatacagtgattttaggatactaaaagttttttcaagtttcatttgcataagtttcttagtcgtgtgtgatcaaaataactgtgttgaaagaattgaggctaagatgtatatgccacagactttaaaacagagtagaatgtcagattaaaagagtttatagtcaaaagattgctaatgtaattactaatgtaatataattactaatagatcacaaatgatagactagttatttccatctttatgtatgaagttataatcacattttatattttgatgtacaattttttatgcatttcataattatccatttattttcttcataaattcaaagactgtcatgagtatatctgcatatttatggttgcccattgtatcaattatctattgctgtataacaaaccatcccaaaacttacaggtttaaaacaacaatatttttcgtgattctgtgagttggctaggtggttcttctgttggtatctcctggattcactcatgtggtagcattcaactgttggaacagcttagaacagggcccctctttccccatgcttactcatgctcagcatcttcacaatactgtgatccatgttctcaagaaggcaagatccagtgcacaaacactttatcaagctgtttcaaacataccacaagggaaagggataccaggagtcatgactgattagaagccattcctgtaacaatctgccacattcatgcatggaaaatttgtgtttcagtacaaaaaaaaaaactagcttagtttctgaggagagagctgaaagtctggtgtggaaaggagacttccttcccattcaataaaatttgcttttactcgttaatactttttgtttaatttaatctatttatttttatttataatgtgatttaataatttccttttatataatttggtttttttttgccatgaggtgttatttttcttttttttcttttgaggcagagtctcactctatctcccaggctggagtgcagtggcacgatgtcggctcactgcaacctctgcctcccaggttcaagcgattctccttccttagcctcccaactagctgggactacaggcatgtgccaccatgcctggccaatttttgtatttttagtagagacaaggtttcatcatgttggccaggctggtctcgaactcctgacctcaggtgatctgcccacctcggcatcccaaagtgctgggattacaggcatgagctaccgcacctggtgagctgttatttttcaaacaaaacaaaaatacttcacaaaaccaatgaatgagtgaacctggcatcagtttagggtctctgatagcagaaacagtagatgattatgaattggtaataacatttgagtagagatactctgattacaaggagcatctaacctatgatactgattctatcatacatcagaaaggtgggtttccagagttcggaggaggctcagaattgtttcagttgtctacctcatggttattaataatttataggagatttgagggaaattttcaattttgtttatttaattttattttaatttgacaatactttggtatcttttggttgtgctggttcattgttctgttgaacaatgctaactctaaaaagaacgttttagacaacataaatcaatggaggaagagaatacatttgccaaaattaacatgaacactttcttaagaaaatagcacttgagaatattgcaattaaagactaagagagtactccgagtctcccaaagtacctacattcttagccaagatacagcagcagctgacctttaaattcatatattccaatttaaataggaagttaaagttgaatattacaattggtttttcagggtaaatgttgcccttttttcctgaggatgagtccaccttgtcttaaagaaaggacaactggcaattctttctctgacactgaccaattgaaaatatgagagaaccaaacaaaagctttccatataatatcaacctaactattcagtgttttgctatagacagactctttgattggccctagttaatctgttcttgttttaattcatctcaaggttcagcattagtcattttatcccaacagatataaccttagattctttctatggataatatatttagactcatcttaatgtaaatttttcatggaggttcatgggtagaacctctaggtgactaaaaaaaaactagctttatgtctagataaaacgctacaactttgttccttataaaataatcagacctgtatagtcagtgaaatatcacaagatccaaattctagtgacttaactttagattgatctaacacctaaggtaggagagtggagttgggggtaagcaaaggagaggagatcatgtaatacattctcagtatttggagaacaatgcggtggaaacaagaaagaatacaaaagaaaattcaaaagatctagtattttgtcttttgaaaaataagatccaggctaggtgcggtggttcatgcctataatcctagcactttgggaggccaaggcagacggatcacctgaggccaggagttcgagactagcctggccatcatagtgaaaccctgtctctacaaaaaatgcaaaaattagccaggtgtggtgtcaggcacctgtaatcccagctactcaggaggctgaggcaggagaatcgcttgaacccgggaggtggaggttgcagtgagccgagatcgtgccactacattccagcctgggcgatagagcaagactctatctcaaaaaagaaaaaagaaaaagaaaaagaaaaaagaaaaagaaaaggaaaagaaaaaagaggtccatgagtagagtactgcatttgtcaggaaaactactacattagacaaaacttgcctttaatgcctggagatacttgctgctgtcaaaaggtgcacaacttaattttgcctctttggctgatgttccccactattctagatgaactgcgcccaaaaacagatccaaagatatccttccccacagagagttggtgatggatcttaggaactaagtgctatgagcatgttgcaaaaggagatcacagacccagttcaggctccctccagcagccccttctcccatgacctctatgtcagttacatccatgtgctgacagtgggcacacccacagccactactggctaccttcctcctggctgtctctgtgtgttcatgacttttgctggcacatctgtagccccaggtccctttctccagcttgccactcctacatatttttcccttatgattctatgctgtttgccatttttgtttgaaagcagtgcattggttaacaataactttgtagtgatagcaaccaccatagcaataatgtcctgcttccttgtatgcctggcatgtttatcatttaatcatcacaacaccatgaagtaaatactcttattgacccaattctatagatcagaaaacaggcctagaatgtgtaagtccctaatgaaggctacttggctaataaatgacaaagccaaattttgaatccaggcagtatggtttcagagtctttgctttactacctcttttactcactatttttgtactaatcttacactttactacatattttctgaaggcagtcaaaatttaaaagttgattattactgccagtatttatcagtcgcataatgtatttatttttattttctgagacagggtgtcactccatcacctaggctagagtgtagtggtgtgatcacagctcactgcagcttcaacctcctaggttcaagagatcctctcatcacagctactggagtagctgggactacaggcgcatgccaccacaaccagctaatttgtgtgtgtgtgtgtgtgtgtgtgtgtgtgtgtatgtgtgtatgtgtgtgtgtgtatatatatatgtgtgtgtgtgtagagatatatatatatatatatagtagagacagggttctgtcatgttgcccaaactcctgggctcaagtgatccacctgcatcagcctcccaaagtgctaggattacaggcatgagccatcacacccagcccagtaacagaatttaagactactctagtgcagtatgatcatttacatggcatccactcattctttcacttaatctttaccacttattatgtacccactaggtcctagtactgcagtaggcactccattcagttatgatcataacagaaaatattcctatcctcctgaagctttcaggataatggaagggacagataacacaaaaataatataaaatcgcaagttgtgataaatgttacaaaaggaaacagaaagttgttttaagacagaaaatagtaggaagctaacttagattgaggaatgatgatcaaggagaacttttctgaggaagtgacattgtaagttgaggccctaacagaccaataggagctaaccagctaaagaggaataattaagtatgcttttagaggagcttgtatttctggaaaaatagtagactagatgtcaatataagttctgcctaaaataattaaaaatttttaatgtgtggcttagtaggaaaataaggagcatttttagaagccaggaattatgagaaagtctgaatcctgatatagaagtaaattctaggccaggcacggtggctcacacctgtaatccctgcactttgggaggccaaggcgggaagatcacctgaggttgggagttcaagaccagcctgaccaacatggggaaaccctctctctactaaaaatacaaaattagcagggtgtggtggcacacgcatgtaatcccagctacttgggaggctgaggcaggagaatcgcttgaacctgggaggcggaggttgcagtgagccaagatggcaccattgcactccagcctgggcaacaagagtgaaactccgtctgaaaaaaaaaaaaaaaagtaaattctaaacctgtgttttttttctctgggcatttgccaatccctcgtggccaaaaccatgggctttaatagatcttgtgcaggagacaaaaggcaaagccaggactctcaaagacttctctctcagtaagtgaactaggagaaaaagcccatccccgccccccccgccgccccccattaacctgttcttcccacagacatgctgttgggataattgcctgtcttaaccttagtgcttgaatgggtgggagtcatatatatcaattatatttttatatgcaaatacatttcatcataaaaagaaaagcataaaactctctagacaagcaatactatattgcaaggccctcagtaagaaaggtatttagcctttttcaaaaaagtaaaaggctggtacacatagaacaaaataagtgctggaaaatgaggttggagatgaagccagggaccagattcatgcaggtccttgaaggccttggttaagagtttgaattgtatcctgcaaatcttttgaagggttcctctctaaagatggaaggagagaggaaactgtagcagtattccaggtgagagggagatatgacttggattagaggaaactggaagaaatgaatggattaaagatacattttgaaggtaaaatgtgtctaacctgctgataaattagatgaaagacttgagagtgagtaaaatataaagggttattcctaagcacctgacttgaaaaactgcttgtccaaaagtctttttttctgagctgaggaagtcaggaggaaatttggaggggggaatgatcaagagttcagttttagaaatattaagtttgataaataaagaatgctaatggagatggtaccactgatataataaaactaaagaggtttttaaaatattcttagttagttgaactcgtaatcgaacaagtcaggatgtaatgataatgaaaatttaccttttataggcaattcaatttatagtaaatttcactgagaggcaaattttttaaagtagaatttcaatgcaataaatacaccattcatttaaattcacattcctgggacagaagagctggatgaatttgcagataaagtaaaatattcggagagagacgctgtggcagagattggctaactgttcaccaaatctattttcttttctttctgctgacacagctggactatatttcccagcctcctctggcttctaaaattattttcttttctgttttataagatgataataaaactctgttctcatagggattgtgatgagcaaactaaaatcagttctgaattgtcaaacgtgaaataaaaattcatttttattagtataggcatgtgactgagactgggccaaggaatgggaataaaagtgatgtatatttcttcctttggtctggttatgtaaaaaaaaaattccttatgcagctttcatgctgtctatcccttgtgtcaactggatattggcacccaaagtgacctcggaagccacacattgagggtgaaagaaccaccttcagttgaaattcctaaaatgactgcatggttcagaatccccatgcctacttttctgccatctgaactttgcataaacaaaaaaataaactattattttaaatcattgagattctgtaattcaactgcttcagcagctagcatatattaaaagatgttaatttgatttcaaggtggtatcaagaacataattttattcccattcatttcttttctcttttttttcaacatgtattttctgtcatacatgaccaggcaaattgagtagattaggatgttaggaggtttgtacagggagtgagggaagctaagatgtttgaggtatgagagaggagttgaaggatatactttctttctatgctccatatcagataatctgtttttctctctccctctgtctgacccagtaattcatttcaaagatgtattcttctgtagctatttctttccacctgctaatagcaccctcattgtaaaacagagacttgatgacaatcttgatctctctcttcttgcccagtttaataatcaagtttttacactgggatacaaaataatcataaatcaaagttgagaaatatgttttcttcctttgtacatctgatagtagatttcatagtatctcttgaggtaaacgcttttgagagtatgcaaagtgtgacatatctctgataggacttgctgaagccagaatgtgccctctgtatctttggccaatggattagccagctagacatactctgacattgttctctgttatatttacttatcagtctttttgcattgttggcttcatcgctccttctcttgagggaaggtatgaggtaaattcagttccctatgctgaacacccagcatgattcctggcaaaatgatattataagtgctttgtaactccttggatgaaaaccaaatgaatgctgaaagtagtgtggtatgtatctgactaataaaaatatgttccaggcggggcgcagtggctcatgcctgtaatcccagcactttgggaggccaaggtgggcaaatcacctgaggtcaggagttcaagaccagcctggccaacatgatgaaaccccatctctactgaaaatacaaaaattagctgggcgtggtggcgcatgcctgtaattccagttacttggggggctgaggtgggagaatcacttgaacccgggagggagaggttgcactgagccgagatcgtgccattgcactcctgcctgggcaacaagagcaaaactcggtctcaaaaaaaaaaaaaaatgttccttgtagaatgaattttctgtattattcactataaagaatttatttttaaccacatcaataatatgtctataagatataggtcattacctggaaattgaaaatatttttatgagaaacttctcattatgatgtttattgtgtaaggatcttaagttgttatcacctttgtttgatgaatgtatcttctacttgtgtactctaaaaaattatcagattatttttatgattggtagagtttatagttttgcaagaattgggcaaatctcacacacagggacaggtggaagagcatgcccccatgagagctttaaaggaatacattctggccctgtggagaattgcctcctcttcaattccagtggcatatggttagatttgggcaaacaaatgctatgccaaatatggcatttattgcctcagttcagatgccaggccaggctgaagtttacagctgtgtcctggttgaaattctaaaacaaaaggagtttattcttttaatctagtgtacccctaatctagaatgatggcattgttagcatctagaattattttctttcccattttatatgatgataataaaagctattctcataggaattgttatgagcagacctaaattcagtgctgatttgtcaaaagtgaaataaaaaaatcttttgtctgtgtggtcttaggtggcagaaatgtaattataagtaagccctaatttctgctaggtatactagtgcttgaccctagtgaatggatagtctctttatagaagtagatatattaatccctttaaccccttgaaaactagtagtagtagctatttgatatacctctttccaaaaagtttctagctggccaggctaagttctcatgcctttggtggtatagcatatggacatttatcttggcagtgattacgtgtaagtataaaagaaatacttaaaatgcaataaaatgagcatatctgtttcacaagactaatgtttcttgctaatcatagagaacctaggataaaatgcataatgttgatcattggaactgaggaaagcttaacaattatactatattggataggtgaaatctaggagtttctgtatacccagagtcctttcctaaggggtcctacctgtagcctcttgctaaggataccaactctagctagatacatatagatggccatgttctatattgcatgactttaccatcttgaccacatctcagaacatttgacctaaagcattcaggtagcttgaaggctgacagatttaacgacctagtacaagtgttttatctaactgatgatagtgacatagtggactgatcagatgttctttcttaggaaatttttaatttgaaatagagagtattatttgataggagcaaacaccaactgcttaaccagaaaaagaggcagacaaaaatgacatgggccgggcgctgtggctcacgcttgtaatcccagcactttgggaggccgaggcgggcggatcacgaggtcaggggatcgagaccacagtgaaaccccgtctctactaaaaatacaaaaaattagccgggcttgctggcgggcgcctgtagtcccagctactcggagaggctgaggcgggagaatggcgtgaacccgggaggcggagcttgtagtgagccgagatcgcaccactgcactccagcctgggcgacaaagcgagactccgtctcaaaaaaaaaaaaaaaaaaaaaaaaaaaaaaaaaaaaatgacatgagtcagtagaagccatgaataagcaagagtgacaagtaagtatgagctaagtcatgaacttttttacgtgtgtgtgtgtgtgtgtgtgtgtgtgttggtaggggtgggggtagatacatatatttaaattgtatctgtgggggaagaggatggtcaacaaattgctgccaaggggataaagaactaattacatcattacttatctattggattctgaacaacttgaaattctccatctgtgttcctatacttttcatgagacctggttaaactactttccatgagttcccataaggcctagccacaaaacatacctttgttccttattttcatgtgaaaccttacaatagctgttcccagttacccctctcacatgcacatccacacacagatacttgagacaactttactgagtctctattctttgtggtcaaaggatcctaatttatacagctgttctatgagttcagtgtttattattttagctctgtaaccaaggcaaggactgatgaacaatagcagttttgtggccacccaagaatatattgaccttgaataggaaaaagtaacgtatataatcctaattgtttaagagaggtgatgcattacagggagggctcagagaaagatggctaacactaatagcacatgttggcattgaggagactacgtggaaatgtgcatttagcaaaatagcttcagaacaatattttttctttctcccctattagattttgagttcctgaagcactcatcttggtgtgcctcaccaattcccaggagagggctctgtatataataggtgaaacactattgagtacataatgtggcccagctatggttctgtcttaaggtttagcagcagctttgaactgcctggtaaaaatattttttcaggcagactaaactgaactgaagagagagatacaagttagagacaagagtcggatttccagaaatttctgggagagatagatatagacagtgtagaacagccaagaaactatgggaggaatttcaaggaaccagataatatatgcataatgttggtcatcagaactaaggaaagctgaactattatactatattagataggccattcacatttaggggactaaggaccagaacatactgttatctagaacatcagaacatctgcagagcacagaacagcatagcatttggccagaaagcatgacatagagtatgggatagaggaggagaattggcaaaaaataaattctagattctgatttttaaaatgacagaacaaagattacagcattattttccttctcccttacaaattatccaactgcactgggagagcaacatggtagaaacatgaaccctatcttcaaagaaagatatatgcacaactccagactacaaaatgtgatgaagaatgataaatgcagttaaaaatgcccacagctgcagatctcacacaaagctggcagaactttctagggggcaaaaccaataatgcccagtttatgggataggatttgtgtactagcagcaggagctttcttggccttcctagggtataaagaagaaagcgggggtgctgggcacggtgactcacgcctgtaatcccagcactttgggaggctgaggcgtgcggatcacctgaggtcaggagctcaaaaccctgtctctactaaaaatacaaaaaaaaaaaaacaaaaaaaaagaaaaaaatttagctgggcgtggtggcaggcacctgtaatcccagctacttgggagactgaggcaggagaattgcttgaacctgggaggtggaggttgcagtgagctgagattgagccattgcattccagcctgggtgacagagtgagaatctgtctcaaaaaaaaaaataaaaaaaaaaaaagaagaagaagggtaatagactcaatgaggaatcacacagacaagatggaaaacatgggaaacacaaagaaaaaagtagagattatatctttactgtcagacaagattgaatttagtggaaaagttttaaataaggcaatgaggaataattcaaagcaacagtatagcattaaacatccataaagcagaaactacagaaaatataaagaataatagttacatagtagtgataagaatgtttattcacttctcttagttcataagagatcaagtggacaacaactaagagaaagaaaacccaaataaaataatgaagtcaatatttgagattgtcaagctttgtatcctgaaaactaagaatgtcaaataaaacattcacaaaaatagaccataaagaaaatttcaaagaatttcaaaaggcaaagtaaatatatacagcattctgtgatctcattgcaataaaagtagaacttaggaaaaagaatatcatcacctggacattttaaatttcctactaaaataattcttagatcagaagaaaccaaacaagttatagaaaatctaaaacaaaagcataatgaaaacaatacatatcagaacttgtgagatggagctaaaatagagttcagaggcacttatcttaatgaagaaagaaaataactccattaaatatctaactcaaagttagaaaaattatcaataaacataaaaaagcagaagaagggaataaaagttataaattagacaaaaattgatcagctaaataaaagagctgattttttaaaaatatgatattaagtttataaaatcaaaaagtagacaggaaagggcataaaccaagaaataatggggaaatgataaaaatagaaaagaagagaatcctaagaaaatattttgttcaatcctgtgcaaattaatttgagaacctagaagaaatggatgattttctaggaaaattgaaaaaataaatactaactttagataactagaaaatctaaactattagcacagaataactttcttttttttttttgatataggaagtcctttattttgtcatgtgaaaccatataacagctgcctaaccacaatgtagatgccaataggagatggctcagaaatagcactagtgactcaaatagtgaccattatgataaaaggaataaagttttgactgatttatagcagttttaaaatgcgttttatattgagtagttatttcatgttttctcaaaagaattattatgttaaaccaaaaataaactaggtatatagtttgttcatataacaaatctacattcaaagacatgcttacaaattttccacttagtccatttttctgttcttagcattactacaaatgcctccttccgtcatcatgttgaattcttcagcatcttctatatcatttccaggggcatctctgggaagtagtgatgcctgtcttccttcagaagcactgataaccccaatatacccacagtacacacattttccctctcctgaggtgtgctactttttggcacaacagaaaaaactcattactaggatttgaaaacctaaattctgggcctggttaggtcataaactacagaaccatagatcatatattctccccaggagcctgtttctccactgcataaataattcatatttgcttggccctttgtagtcctttactgtttcatttatcttcatgataacccttaaatttaagtaaggtagcagtatgctcattttatagaagaaattcagtctcaaagaggatacacagtctcccaaagatcccacaatagtaatatattaggcagagctaaactcacacaatcttactcaagatcctagtgctggtacatggtatgctcataagtttgctaaaatggatgaagcagcagtttctcaggtccctttcagtgatcctgttctctgcttccacttgatgttttttctctcgtctctcaactagcattaacatccaaaactatatataatcactaaatttcatttaccatcattttcttatttaattattctttaaatttttctatttccatgttaaatccagagaaatgttactttttcgaaagtttctactgctgcctgcctctctgaaggccatgggacttacctatttgtttgtcaaagcaaaaattcccaacattttgtaaacaccactaattactttttataactgtaaaaacaattattccatacttaaaaccaattcaaaataaaataaatcctcgatacttcttactccctggagtagtaattttaattagattctactgattcgtaattttttcctctgtgcctttatttgggaaatactgttagtctacctcactatcaagtctctttccctaacaagaaaatgtcacagtcttttttttttttttttttatactttaagttttagggtacatgtgcacattgtgcaggttagttacatatgtatacatgtgccatgctggtgtgctgcacccactaactcgtcatctagcattaggtatatctcccaatgctatccctcccctctccccccaccccacaacagtccccagagtgtgatattccccttcctgtgtccatgtgatctcattgttcaattcccacctatgagggagaatatgcggtgtttggttttttgttcttgcgatagtttactgagaatgatggtttccagtttcatccatgtccctacaaaggacatgaactcatcattttttatggctgcatagtattccatggtgtatatgtgccacattttcttaatccagtctatcattgttggacatttgggttggttccaagtctttgctattgtgaataatgccgcaataaacatacgtgtgcatgtgtctttatagcagcatgatttatagtcatttgggtatatacccagtaatgggatggctgggtcaaatggtatttctagttctagatccctgaggaatcgccacactgacttccacaatggttgaactggtttacagtcccaccaacagtgtaaaagtgttcctatttctccacatcctctccagcacctgttgtttcctgactttttaatgatcgccattctaactggtgtgagatgatatctcatagtggttttgatttgcatttctctgatggccagtgatgatgagcattttttcatgtgttttttggctgcataaatgtcttcttttgagaagtgtctgttcatgtccttcgcccactttttgatggggttgtttttttcttgtaaatttgttcgagttcattgtagattctggatattagccctttgtcagatgagtaggttgcgaaaattttctcccatgttgtaggttgcctgttcactctgatggtagtttcttttgctgtgcagaagctctttagtttaattagatcccatttgtcaattttggcttttgttgccattgcttttggtgttttggacatgaagtccttgcccacacctatgtcctgaatggtaatgcctaggttttcttctagggtttttatggttttaggtctaacgtttaaatctttaatccatcttgaattgatttttgtataaggtgtaaggaagggatccagtttcagctttctacatatggctagccagttttcccagcaccatttattaaatagggaatcctttccccattgcttgtttttctcaggtttgtcaaagatcagatagttgtaggtatgcggcgttatttctgagggctctgttctgttccattgatctatatctctgttttggtaccagtaccatgctgttttggttactgtagccttgaagtatagtttgaagtcaggtagcgtgatgcctccagctttgttcttttggcttaggattgacttggcgatgcgggctcttttttggttccatatgaactttaaagtagttttttccaattctgtgaagaaagtcattggtagcttgatggggatggcattgaatctgtaaattaccttgggcagtatggccattttcacgatattgattcttcctacccatgagcatggaatgttcttccatttgtttgtatcctcttttatttccttgagcagtggtttgtagttctccttgaagaggtccttcacatcccttgtaagttggattcctaggtattttattctctttgaagcaattgtgaatgggagatcactcatgatttggctctctgtttgtctgttattggtgtataagaatgcttgtgatttttgtacattgattttgtatcctgagactttgctgaagttgcttatcagcttaaggagattttgggctgagatgatggagttttctagataaacaatcatgtcgtctgcaaacagggacaatttgacttcctcttttcctaattgaataccttttatttccttctcctgcctgattgccctggccagaacttccaacactatgttgaataggagcggtgagagagggcatccctgtcttgtgccagttttcaaagggagtgcttccagtttttgcccattcagtatgatattggctgtgggtttgtcatagatagctcttattattttgaaatacatcccatcaatacctaatttattgagagtttttagcatgaagggttgttgaattttgtcaaaggctttttctgcatctattgagataatcatgtggtttttgtctttggctctgtttatatgctggattacatttattgatttgcgtatattgaaccagccttgcatcccagggatgaagcccacttgatcatggtggataagctttttgatgtgctgctggattcggtttgccagtattttattgaggatttttgcatcaatgttcatcaaggatattggtctaaaattctcttttttggttgtgtctctgcccggctttggtatcagaatgatgctggcctcataaaatgagttagggaggattccctctttttctattgattggaatagtttcagaaggaatggtaccagttcctccttgtacctctggtagaattcagctgtgaatccatctggtcctggactctttttggttggtaaactactgattattgccacaatttcagctcctgttattggtctattcagagattcaacttcttcctggtttagtcttgggagagtgtatgtgtcgaggaatgtatccatttcttctagattttctagtttatttgtgtagaggtgtttgtagtattctctgatggtagtttgtatttctgtgggatcggtggtgatatcccctttattattttttattgtgtctatttgattcttctctcttttcttctttattagtcttgctagcggtctatcaattttgttgatcctttcaaaaaaccagctcctggattcattgattttttgaagggttttttgtgtctctatttccttcagttctgctctgattttagttatttcttgccttctgctagcttttgaatgtgtttgctcttgcttttctagttcttttaattgtgatgttagggtgtcaattttggatctttcccgctttctcttgtgggcatttagtgctataaatttccctctacacactgctttgaatgcctcccagagattctggtatgttgtgtctttgttctcgttggtttcaaagaacatctttatttctgccttcatttcgttacgtacccagtagtcattcaggagcaggttgttcagtttccatgtagttgagtggctttgagtgagattcttaatcctgagttctagtttgattgcactgtggtctgagagatagtttgttataatttctgttcttttacatttgctgaggagagttttacttccaactatgtggtcaattttggaataggtgtggtgtggtgctgaaaaaaatgtatattctgttgatttggggtggagagttctgtagatgtctgttaggtccgcttggtgcagagctgagttcaattcctgggtatccttgttgactttctgtctcattgatctgtctaatgttgacagtggggtgttaaagtctcccattattaatgtgtgggagtctaagtctctttgtaggtcactcaggacttgctttatgaatctgggtgctcctgtattgggtgcatatatatttaggatagttagttcctcttgttgaattgatccctttaccattatgtaatggccttctttgtctcttttgatctttgttggtttaaagtctgttttatcagagactaggattgcaacccctgcctttttttgttttccatttgcttggtagatcttcctccatccttttattttgagcctatgtgtgtctctgcacgtgagatgggtttcctgaatacagcacactgttgggtcttgactctttatccaacttgccagtctgtgtcttttaattggagaattgagtccatttacatttaaagttaatattgttatgtgtgaatttgatcctgtcattatgatgttagctggtgattttgctcgttagttgatgcagtttcttctcagcatagatggtctttacattttggcatgattttgcagcggctggtaccggttgttcctttccatgtttagtgcttccttcaggagctcttttagggcaggcctggtggtgacaaaatctctcagcatttgcttgtctgtaaagtattttatttctccttcacttttgaagcttagtttggctggatatgaaattctgggttgaaaattcttttctttaagaatgttgaatattggcccccactctcttctggcttgtagggtttctgccgagagatctgctgttagtctgatgggcttccctttgagggtaacccgacctttctctctggctgcccttaacattttttccttcatttcaactttggtgaatctgacaattatgtgtcttggagttgctcttctcgaggattatctttgtggcgttctctgtatttcctgagtctgaacgttggcctgccttgctagattggggaagttctcctgggtaatatcctgcagagtgttttccaacttggttccattctccacatcactttgaggtacaccaatcagacgtagatttggtcttttcacatagtcccatatttcttggaggctttgctcatttctttttattcttttttctctaaacttcccttctcgcttcatttcattcatttcatcttccattgctgataccctttcttccagttgatcgcatcggctcctgaggcttctgcattcttcacgtagttctcgagccttggttttcagctccatcagctcctttaagcacttctctgtattggttattctagttatacattcttctaaatttttttcaaagttttcaacttctttgcctttggtttgaatgtcctcccgtagctcagagtaatttgatcgtctgaagacttcttctctcagctcgtcaaaatcattctccatccagctttgttccgttgctggtgaggaactgcgttcctttggaggaggagaggcgctctgcgttttagagtttccagtttttctgttctgttttttccccatctttgtggttttatctacttttggtctttgatgatggtgatgtacagatgggtttttggtgtggatgtcctttctgtttgttagttttccttctaacagacaggaccctcagctgcaggtctgttggaataccctgcagtgtgaggtgtcagtttgcccctgctggggggtgcctcccagttaggctgctcgggggtcaggggtcagggacccacttgaggaggcagtctgcccgttctcagatctccagctgcttgctgggagaaccactgctctcttcaaagctgtcagacagggacatttaagtctgcagaggttactgctgtctttttgtttgtctgtgccctgcccccagaggtggagcctacagaggcaggcaggcctccttgagctgtggtgggctccacccagttcgagcttcccggctgctttgtttacctaagcaagcctgggcaatggcgggcgcccctcccccagcttcgctgccgccttgcagtttgatctcagactgctgtgctagcaatcagcgagattccgtgggcgtaggaccctccgagccaggtgtgggatatagtctcgtggtgcgccgttttttaagccggtctgaaaagcgcaatattcgggtgggagtgacccgattttccaggtgcgtccgtcaccgctttctttgactcagaaagggaactccctgaccccttgcgcttcccaggtgaggcaatgcctcgccctgcttcggctcgcgcacggtgcgtgcacccactggcctgcgcccactgtctggcactccctagtgagatgaacccggtacctcagatggaaatgcagaaatcacccgtcttctgcgtggctcacgctgggagctgtagaccggagctgttcctattcggccatcttgaaaatgtcacagtcttaagagtcaggaaagcttttactttcactatcacatatgaagaatgaactaaacacctaaactggacagtaaaacttaaatgagggattcaggatatttcccaaggggccatatgacgaatttaaaagttggtatgatgtgcctaaaataacacgctcttttacttataataaaggtacagatgtagtgattagtcatgctgacatgtacatataaaatatgcctatgccaaattaaaagaaaacaaaatacattctatggcaatcctgaaaagtcagggaggtcaataaatattaagagtatgctctcacaattagcattaaacacatggtaattaacacaatttaatatgtgaaaaatgagaaaatatacaggatgagaagtacacttaggaatttgttgtgattttcttcattttgattgtattgctttcttgtcttcaggagatttcgacttctgaattcgcatctttctgttctaaatggtattcttgggctattttctcagcagttcatgtttctggataaagtttatgattattgagaagtgtcaatgcttctacaatggaaattttgcctttgggaatgatcttaatatttatcatattaaagtgatggccaaaaggcaatctgaattctttcagctcttgacatctttcagcagcttttacctgcatggaagacacaggatctttggaatcaacatacacatcttttagaaatgacagcagcttgtcatctttatgagcaatctctcccttaatttctggatagaaactaatctgctcttgcaggaggctgttggtagaggggtgtctgggattgggagggggcttcatcttgttgatttcccattcctctcagttctctaggttgaaattcctgatcctgcgagtcactgcagcccccatctcctcataacatgatgccctcaggtttacgccacacgtgggaacaccagtgcaggaaacctccggggtaccctagaataactttcttctactgaggccttggtgatttaacaggagaattctaccaaacctttcaggaataaatcaactcagtcttcccaaatacatatgctttaataaatgtggatatctctggaaggacacatgagaaactagtaaacagttattattcccagggaacagaactgggactgagggacattattagaaagaagtcttgctttttcctgtatatcttttataccttttgtgttttgtaccatttgcatatggtactcatccaagtatgaggaatttagaacatctttgttttacatttgaacaagttgacaacactgtttggcttttgttattatgtttaccttacgttttcagtaaatgtagtaggcataatttcttaaatacctcccttccccaaagatgtcccaccgtaattcctggaatcatgatgaatatgatgctctattactgattctgtgattatgttttgccatatggcacagttgacattaaaataggaaattcaagcctacattatctgagtgggcctaatcgaatcatatgagccttgaaagcagagagctttctttggctaatggcaggaaggaaagtcaaagagattggaagtatgagaaggactcagtgtgcaatagctgctttgaaagtggaggagaccacttgagaaagaaggcaagtagttttgaggagctgagggcagctcccagctgacagctagcaagggaactggccaaatccttgcaacctcaaggaactactagctctgtcaaaaacctgaaagaggttgagagtggattcttccccagtctccagatgagagtccagcccaacaggcatcttgatttcagctttgtgataccctgagcagagcccacttgggactcctgacctatggggatgtgagataataaatggatattgttttcagctgctaaatatgttatataggagtagaaactaatagagcaaaattatgttctaaaactttaatacatgtgggctttcagaggctttagagatgggagccatattccctccagtctgggtgtgatgggtagtgccaaagaagctgcagagccggtggaacagtgtcatgtgtcagccagaggctgcatcgtttccattggtgccataagtagaatatgctctgctgtcttttcattactttctccaattgtgcagagaatgaattttttatatctgtctcagtctttagaagcaattttttagcatttctgttttaaataatcttgtattttcaatgaagaagttgccatttctttctttttttttgagacagggccttgctctgtcgcccatgctggagtacaatcaccacttactgcaaccttgaccttccaggctcaagcaatcttcccatctcagtctcctgagtagcttggctacagacacgcaccaccatgcacagctttttttttttttaattttttttgatagagacagagtctctctgtggttgcccaggctggtctcgaactcctgggctctagcagtcctcccacctcagcttcccaaagtgttgggattacaatgtgtgccacaacacctggccttttctttggatgtcttaggaaattaactcctacctttctaaaaattcctgggtttatgtgacctggatttaaatggtcatgagagaaatttctgatatgatagtgcaatcaagtaacactggaattctttgactaccttagtttttctagagtttcacttaaattaacccaattttgttccattggcagttttatccaagactgaataaaggtagtttaccttttaagttgctatacactagaacttacctttcaattaattcttttaatttaacagtgtggaaagctattatttactttttatttaattgatagtacttttgtaaacttttacctgaaaaaagtaactttgagaaccacagagaagaaacatattggttaaggtttctgaagagtgtcggaggattcaagagtgtggggaattgcttctgtgattcccatcacttcacattctgagtagaaaagcacacaacagaaatgctgcaagtcagcatcaggagtccatagcatccatcatcaagtgcaataagactgtgactctctgttactgagttgtgatgctttttctttttgccagtaagttacatggtccagttttttctttcttagatgacttcagggacttgttgtaagcctgctgaggtcaaggaatgcttctgccttatgtgcagtgtattataaaaagatttatctgtgataaaagtggaactcggctgggcatggtggctcacacctgtaatcccagcaatttgggaggctgaggcgggctgatcacttgaggccaggagttcgagaccagcctggccaacatagtgaaaccccatcgctactaaaaatacaaaaaaattagctgggcgtgttggcatgggcctgtaatcccagctactcaggaggctgaggcaagagaatcacttgaacccaggagacagaggctgcagtgagctgagatcatgccactgcactccagcctgggtgacagagcaagatttggtctcaaaaaaaaaaataaaaacaaaaaaaagtagaacccatgaagaaaaatttaaacaactgattttaatgactgtaaaggagtatcactagtagaaaaatgtttctatattgttaggataatcaagtttctttaaagataatattgatcatttttagcagaagtttgttatttatctttaggaaatgaaattaaatattttgctttgttttgtttttaatgtttctaaaaggaatgaaactgcattattgctgattctgttgtggattgaggcatttagagtagcaaaaattatattaatgctctgtgccaaaacacataaaatggctttatcactgattggtgtctcaattataaaaaggtaataatttgcataatatgataagaatgccacttgaaagaaaggaggctgggttgttttttttttttttaacatccagtaaaacatgattgacatcatctagtcaaattatatattatactgagctttattttctgtataaaccatattttacagatattattttaaaagaaattgaaatcttctgggcttaggtttcagagttatatataactcataagtgagctgtgtgagctgagttccttaaacctaggtctcatttcaaaggctagctttgggctggttgcagtggctcacgcctgtaatcccagcactttgggaggctgaggcaggtggatcacaaggtcaggagatcaagactatcctggctaacacggtgaaaccctgtctctactaaaaatacaaaaaattagccaggcatggtggcgcacacctgtagtcccagctactcgggaggctgagacaggagaattgcttgaacctgggaggtggaggttgcggtgagccgagatggcgccactgcactccagcctgggcgacagagcgagactccactccatctcaaaaaaacaaaaaaaacaaaaaggctagctttgttccaaagcccaaacctggctctggtagactattttctaagctatctcttgatgagctttgctaaaggaaagggaagtatggtacagatcacctcaaagtcatgtttggctctctctgcatttggagttttcctctggcatgtttatattctgaataatgcttctcctaggctaaatacagtttggaccctgcatcttacaacagatgtgacagaggaatgcttatggtcaataatgatgtacagtccacagtgataaagaaattggtgggaatgagactttgagaagtataatgaatgtcagattgcaggctgcccatagtacatccagcatcagcacactgtagtttgccttaactaatttgggcctctgcagctttgggacagtattgcaaataggtggtataataagcttaaataacagatttccatcacttaaatatgaaaatctcagatttgtcacagtaataatattgacctcatgtttttgtttttattttttgttcattgacttcatgaatgaatagtttggcaggaaagcaggtaatacacttccaggccttatattacataggtgttgaggctagagaatgtcacagaggcgtgcccttattcataaaacactaggggaaatgccttactgtgttttattaagcgaagacctttcattgtaaaggtgagattattcctttagaaaccatataaattactgaagggaattatgagcaagaatatattttgggttcatagatgccaaatgcccatctcactggatgattattattctaagtattttccattacctagtttcagctcaggaaatcaattagacccttaagggcctaagcaagcaggaaatgagtgatagatttatagattccaccagtgaatttgaaaaaaaaacttttaccttttaaattataactgcaatagactcaatataaatgctttttttttttttttttttttttttttttttttttttttttttttgagacgttgtctcactctgtcacccaggctggagcgcagtgatcttggctcactgtaacctctgcccccaggattcaagtgattctcttgcctcagcctcctgagtagctgggattacaggcacgtaccaccgcatctggctagtttttgtatttttagtagagacagggtttcgccatgttggccaggctggtctcgaactcctgacctcaagtgatccacccgcctcggcttcccaaagtgctgggattacaggagtgagccaccacacccagcccataaatgccttttttagtgctccctctttctttcctatgtaaacccttttcaagttagattttccctatgatattctcaataaagaacaaattacataaaatcaggaacctgattttatattaagtgtaggaagtcaaattaccattgagcgtaggtcatatattctagtagtagagaccaatctattttctgccttgttctggagggtcatagcaaatctgaaccaggcagccaggtagaccaccactctgatggccccattcaagcttagagcttccccagtctgaaagacactggaggaagcttcttcccaccttatttagctccaagagttcagttgtgctctgtggaacactaggaataactgtatcctagacataaaccaagggcaagacatggttttagtttccatgagggcctttgcttaagagtcagaagggctgctacacatcttaattttgccactgaatagctatgtgataccaggcctttgacataagcagttaagttagaggactccagagggcctgtccagctcttacataagtctaaattccacctgtgatttcataggatccttaagtaagcattccacttctatgggcctcattttctgcccctattaaacaaagacatggctcttgagagcctgtttaaagcaggtttttgaaaagaaagtctcaagtcaaagaaattttgaaatggatttagattaaaaggtatttttgtgtgtgtggagaatgtgggattaactcacttatttttattatgtatagaaatttcagtttgttactatagactatttacagaaatatgagttcttgagtttttcattctgctaccccagatgtgtagcactctgctttgtacatagaaagcacttagcaacttgtgtgttctcttgaatttaactgaagtcccacttgaaaaggtaaagttatataaactactttttagtatttgaagtttctttaagcctatttttaatgatggcttggtgttcatgcaatgacttatttttgtttgtactggcagagcgtagctttttcagttggccagttaaaatggaaagacaagctggacgcagtggctcacgcctgtaatcccagcactttgggaggccaaggcgagtggatcacaaggtcaggagttcaagaccagcctggccaagatggtgaaaccccatctctactaaaactacaaaaaattagccgggtgtggtggcgggcacctgtagtcccagctactcgggaggctgaggcagagaattgcttgaacacaggaggcggaagttgcagtgaaccaagatcgtgccactgcactccagcctgggtgacagaacaagactccctctcaataaaaaaaaaaaaaaaagaaaagaaaagaaagtaagacaacttgtgctcttatttttaaaatattatatacttctagccccatacaaatattctcagattagactaaccaattacacattggaatacctggacagttttaaaatacaactaaaactgaacagaagcatccaaaggtcaaccactgttttactggacataccttttactttgctattttatgtattttatattaaagttagacctttgaggccaggtgcagtggctcacacctgtaatcccagcactttgggaggctgaggtgggcagatcacctgaggacaggagtttgaaaccagactggccaacatggagaaaacccatctgtactaaaaatactaaaattagccgggcgtgctggtgcgcacctgtaatcccagctactcaggaggctgaagcaggagaatcacttgaacctgggaggcggaggttgcagtgagtcaagatcaccccactgcattccagcctgggagacagagcaagactccgtctccaaaaaaaaaaaaagttagacctttgggtttaaaagccccaggataaacacatgaaaaaaactttcaaaatttacaagtgtaaaatatgctcagtacatccttcttcccacccaaccaaacaacaacatctcaagttaaatcaagtggtataaaatgtcaacctagaattctaccactgccccagggaagttctgtctgcccactgtcgtctgcttttacaggtctacactagaaacaacttcccttgataggaagtactgactttgttcagagctgtaaaattatacccagaacctcccttgttcttgttctatatgagtcccagggcctgagagccgccatttatgacgctttggtttgtcacaccctgcacacaccattagagacatttttctctcttggctttgtatctgcttccttctgttgctaccctctccatttcctattttcctaatttttaaaaatgaaatttatttttgctttttcatttgtctaagacttaggctttcatttccccagctgtaaatcaggcattagataataatctctaaagccaattccaatactctgtgaagtcattgtatcttatatttatgagtaaatatagttatcatctttttgataataaattcatcaataaaccatggattggaatacataagaatctgaaaaccctttataaccctcctatctctgaaattcacagatactgctatatagaactgattgatgaatttcaataatatctacaccaacatataattaataatgatatgtattaataatattgataacaatgagacacccacaggtgacttgtcagtaactgatttgtgatttcctaattttaagagtgtgtgtattcttgttgtaatctatgagagcaagaaccttctcaaaataaaagaaagtttttcacagatactaattcagtgactcatttactgacaattttcagtagggtcagaaacaatatcagattggtctgaaattataaaaaatatttttaagagtctaatagttaaaagttaatttggggtgaaaaacaactcctctctataattgtattttattttattgttttattgtttaattattttattgtgtatttttaggcagggtctcactttgtaacccaggctgggatgcagtggcactcattgcagtcttgacctcccaggctcagatgatcctcctacctcagcttcccaagtagttgggattacaggcatgtgccaccatgcctggctaatttttttaaaacttttttgtagagatggggtctcactacgttacttatactggtcttgaactcctgggctcaagtgatcctcctgcccttggcttctcaaagtattggaattacaggcataagccacacactagaccagtaattttaatatactgtatatccatggtcctcaacagggagtgattttgccttgaggggacatttagcaatgtctggaagatattttggttgccataaccttgggttgtgagatgctactggtatctggtgtgcagaggccaatgattgtgcaaagcatctttaaatgcacaggatagctccccacaacaaagagtcagccattccaaaacactaatagtgccaagattgaaaaactcttccgtatgtgactgtgtgactcaactgagttctatgatttggagagtcttttcatatttaattctagaggttgtgaaaataaaatgaaggtcattataatgtcatagttcagccatgtgtaccattaccaactgcttgctgactcttggccttttatccttacctagactattagaccttcacaatggattcttaagtctggcctgagacacttattattactacaggaaaacaaaaaagaaagcaaaagatcctactatctggtaataaatgtctcatctgagcaggtttaaagatcaaataatctttgaaaaataacaattctggctattattaaaaagtcaaaaaataacagatgctggtgaggttgttgagaaaaaggaatattttacactgttgatgggagtgtaaattagttcaaccattgtggaaaagatagtgtggcgattcctcaaagacctaatgacagaaataccatttgacccagcaatccctttagtggttatataacaaaaggaatataaatcattctgttataaagacacatgcatgcgtatattcattgcaacactattcacaatagcaaagacatggaatcaacttaaatgcccatcagtgatagactgtttaaagaaaatgtgaggccgagcgtggtggctcacgcctttaatcccagcactttgggaggccaagacgggtggatcatgaggtcaggagatcgagaccatcttgcctaacatggtgaaacgccatctctactaaaaatacaaaaaaaattagccaggcgtggtggcgggtgcctgtagtcccagctactcgggaggctgaggcaggagaatggcatgaacccaggaggcagaggttgcagtgagcggagattgtgctactgcactccagcctgggagacagagcgagactccatctcaaaaaaaaagaaaatgtggtacatatataccatggaatgctatacagccataaaaaagaatgagattgtgtcctttgcagggacatggatggagctggaggccattatccttaacaaactaacaccgaatactgtgtgttctcacttacaagtgggtgctaaatgatggtcacacagaggggagcaacacacaccggggactaccagagggcagagggtaggagggagaggatcaggaaaaataactaatggatactaagcttaatacctgggtgatgaaataatctgtacaaaaaaaccccatggcacacgtttgcctgtgtaacaaacctgcacatcctacacatgtacccctgaacttaaaagttaaaaaaaaattagaaataacaatttttatatagcagtatgctttaaaatgatgtcatggactgttaaacttcagtagacttgaccaatcatttagtccaatgctttttttttttttttttttttttccaaataaagtaagagcctcactatctaagctcacatggtatattggttgcaggattaatacaaggaggcatgattacatgatcacaatccagacacaagtcacctccttcatgacaaaattcatcacaaatgtaggttctttatgtggttcttatatggccctcactagcttttgcatcaaggtttgctcagtgtggactttacgaaaatcaggaaggagatgatttagtgagtaaggggattagaaattgtatcctggcaccatttacacaactcgcaacacaatattaaaaaatgactagggagacggaggtggaaggatattttatttatataaatcttagccatgcccagtggtacacacctactgtcccaggtacttgggaggctgaggcaagataagttgaggttgcagtgagctgtgatcatgccactacactccaatctggataacagagcaagaccctgtttaaaaaaaaattaaaaatcaagtgattttttaaaaatgaagaaaaggacaagtagagaggtagggtggggaattttcccttgaatcctcaaaataataaaactgtatattccactttttatctccttccttcacaacatttgaaattccacagtaattttcccttcggttatttgcctatttcctttttaatggtttccattgttatacccagtagattaaacaacattcttctttacttattgaattgatatagtaagatctgcaaaaaaaagttattccaaaatgcttatagtaaagaacaaagtttttagggatctaatagtttctttccttcccaaccttattgagatataaatgacaaataaaaattatttatatttaaggtgtataacatgatgcatacattgtgaaataattaccacagtcaagctaattaacacatccaataccccatatagttaatgtgtgtgtgtgtgtgtatgtgtgtggtgggaacacttatgatctagcaaatctacatctcccttaccaaacttcaatatacagtagagtatcatgaacttgtagtcaccatactgtatattagatcctcagaactttgtcatcttataactgaaatttgggccctttgagcaacatctctctatcttatcccccgacaaggagcaaccaccattctactctctgcttctgtgagtttgacatttttagattccatctgtaactgaagtcatataatatttgtctttctgtgtctggcttatttcacttagcataatgtcttccagcttcatccatgttgtcatgaagggcaagatttccttcttttttatgactgaataatattctattatgtatatctataaatgtaaatatatataccaccttttttgtatccattcatccatcaacagatgcttaggttatttctatatcttggtcattatgaataattctgcagcgaatgtaggagtgcaaatatctcttcgagatactatgctgatttcattacctttggttacatatccagaagttggattgctgcagtagttccattttttatatttgaagatcctctgtactattcttcatagtaactgggccaatttacatttccaccaaaagtgtataaaagttctcttttctccatatcctcactaacaattgttatctctttttttttaaataatggccatcctaacaggtatgaggtaatatttcatggttttgatttgtatttccctaatgattaatgatgttgagcaccttttcatatacttgctggctgtatttatgacttctttgggaaaatatctattcaggtcctttggccatttttaaattgggttatttggtgttttgctgttgagttatatgaattctttaaatattttggatattaatccctcatgagatatatagtttggaaatattttcttccattttctaggttgcatttccattttgttgactgtttcctttgctgtgcagagctttttagtttgatgtagtcctacgtgtttatttttgcttttattgcctgtgcttgtgtcaaaaaatcattgccaaaatgagtgtaaaggagtttttcccttaagttttcttctaggagttttgtgatttcaggtcttaaatttaagtctttaaatatttcacgttaatgtttgttatggtataagataagggtccagtttcattctcttgcatgtggagatccagtttttccagcaccgtttattggagggactatcctttccccattgtgtattctccttggtgcccttgtcaaagagagatctagtagtttctaagcagcatcatgaagctgtatctttactgatttcatgttacaacaaaatttttttaagcacaaacccaggggtgtgacataccctgaaactggtgatttgaaaaacagtactgttagagaaagggatctatggagatcattgttagtagtagtaattggggcattggatcaggataccccagttatcctgatccaataccttaattatataattaagtttttaagtgtagaagtgggtgtaatgatcactgttttgataaaattaaaatattaatgtgttaaagtacccatctcatttggtgctagtagaaaacgaaatgcataaaaactattgctaaaagtcactaaacctctcttacagcctaattagcaagttaatgctttttccttttggctgttccctaatttttcattcaatttatcttttcctgaaaacctgctaatttcatgcactttagccctacggaagaggacgttgcttagcaactgcctaaataactaatagacctaggtatctagtaaaggcttgaaggatttacttattttaaatttatatatttgtgtattaaccatcaaatccaagaggaagttgtttcactttggtatttcttcggatttctgcatttttatgattaattcttttcttttttttttaaatggagtcttgctgtgtcgcccaggttggagtgcagtagctcgatcttggctcactgcaacctctgccacctggattcaagtgattctcctgcctcagcctcccaggtagctgggactacaggcgcacctaccatgcctggcaaatttttgtatttttagtagagacggggtttcaccatcttggccaggctgatctcgaattcctgacctcaaatgttccacccacctcggcgtcccaaagtgctgggattacaggggtgagccactgtgcctggcctgcatttttataattaatttgtacatgagttgtttgtagcaaaaaaaaaaaaaaagaaaaacagtatatttaatgggaacttcttttttctcccttcaacctcttagtaacattgctgtatttgtcatttactttagttaatcttttctaacagaataccctatcaatgatatttgctgagttaagaaatgttttctgggccgggcgcagtggctcatgcctgtaatcccagcacttttggaggccgaggcgggtggatcacgaggtcaggagatcgagaccatcctggctaacatggtgaaaccccgtctctactaaaaagacaaaaaattagccgggcatggtggcggacgcctgtagtcccagctactcgggaggctgaggcaggagaatggtgtgaacccgggaggcggagcttgcagtgagccgagatcatgccactgcactccagtctgggtgacagagcgagactccgtcttaaaaaaaaaaaaaaaggaatgttttctggccaggcacagtggctcacacctgtaatcccagcactttaggaggccaaggcaggcagatcatgaggtcaagagttcgagaccagcctggccaacatggtgaaaccctgttgctactaagaatacaaaaattagccgggagtggtggtgtgtgcctataatcctagctactcgggaggctgaggcaggagaattgcttgaacccaggaggcagaggttgcagtgagccaagatcgtgccactgcactccagccttggcaacaaagcaagactctgtcacagaaaaaaaaagttttctaattcactggatacagaattctataatatttctttttaatggtaagctaattattttagaggaaatacattaaggttttaggagaaggaatttagaaattaaattgaagtcgttgctattacctatacatgatggttttacttttggttgtttgacccagaagtatctcagaagctcatctgagctaagggttttctaaggtttgagggtatgagtggtgctgtcattttgcaatgtcctgttatacttaatttagccttggtgtgtttacttgtctgaggttaagtctccccactatgacatataaagctgtattattatccaaatctcagacctattttcttcactcttatattagttcattctcacgctgctaataaagacataccagagactggttaatttataaaggaaagttgtttaattgactcacagttcagcatggctggggaggcctcaggaaacttacagttactgcagaaggggaagcaaacatgttcttcttcacatggtggcaggaaggagaagaatgcgagcaaaatggggaaaagccccttctaaaaccatcagatctcatgagaattcactcactatcacaagaacagcatgggggaaccacccccatgatctggtcacctcccatgaggtccctcccccaacatatgggaattacaatttggattacaattcaatatgagactttgtctggggacacagccaaaccatatcaactgtgtttctgttcaactgccctgaagtaaaaacaaaataccagcaaattttcttactgcaccctttgcattctgtggtgttgagacattaaagaccatttgcatcaggctagtgtggtggctcactcctgtaatctcagcactttgggaagcctggggagaggatcacccagagctcaagggtttgagaccagcccggacaacattgccaaaccctgtctctacaaaacctacaaaaattagctggatgtggtggcacacacctgtggtcccagctacttgggaggctgaggtgggaggatcaccgaagcccgggaagtttgaggctgccgtaagccaagagattgcgccactgcactccagcctgggtgacagagtgagaccctgtctcaaaaaaagtaaataaataaataaaagaagaccacgtgccacttgcacaaatatattagcagtaaaaagaacacatagttgggcatgatggcacatgcctgtaatcccagctacttgggaggctgaggcaggggattatttgaacccaggaggtggaggttgcagtgagccgagatggtgccactgcattccagcgtgggtgacagaacaagactccctctcaaaaaagaacacaggcaacttatattaatagtgttaagcgagtctacattaaagagaaactgtgctttcaaagagttacttttgtctcagaatgaagctcctttacaaaatggctgctttagaattctatcttgcagagaggctttgggcaaatttatagcatattttctttcacaggcaagaactcctaagatatcattttgtgtaatgattaattatcctctatagatatcagagatttttttttgttttaatggagtatcttcagtaagacattaccctatcataaaataaagtgtatttaaagcaatattgccaggcacagtaacttgtgcctgtggtcccacccactcgggagctgcggtgagaagattgcttagcccaggaattcaagtctggcctgggcaacatagcaagaacctgtaactttttaaaaaaggaaatattagattattagtagctatagtaactataaataatagaacatttcatctacaattgactaatatagagcttatttataaactgcaatctgtaagactgtatgtatcatgttcacatctcaactgtgctcatatctcatttgcattgtcaaccactgtacaaagagaacaatgtaggataactagagtgaagtttaaagattcatacttagtaagttatctgatacaaagacaatatctgccaaatagtttaggacaaaaatgatttttaagagatatgtatctttgagagagagtgaaggagaggaggggagagggagggagggggagagagagagagagagagagagagagagagagagagagagagagagagagagatgccagcctgccaatattcaaagagtttaaacttcaaccataacgtttattttttctccttctctcatctttccctctatatctatctatagaaatataaaaacatattttagatttaacataaaaaattaactgtcattcaaatgaatgaaattagaatgttctgggcattgccactgccaccactatgacagctgttttagaattatgaaaatctttttattattttattttagaccattaagcaatttactattgctcttaaagcatacataaagccaatttttaacatcatggaagccatcgctgacaagaatgttgcctcaattcacatgatattttctattatagcagtctgttaatgtgtattgcattcatcagtaacttgaggaggaattgataaattgccttcagtcttctttctcctcatatttgcgaatgccttatataataaatactactacaggccaggcatggtggctcacacctgtaatcccagcactttgggaagctgaggtgggtgaatggcttgagtttgtgagttcgagaccagcctgggcaacatggtgaaaccccttctctactaaaaatataaaaaatgagccaggcttggtagtgcatgcctgtagttccagctacttgggagactgagagaggaggattacctgagcctggaaggttgaggccacagtgagctgtgatcgtgccactgcactccaccctggacaatagtgagaccctgtctcaaaaaaaaaatttttttttttaaatttaaaaattagctgggagtggtggcgcttgtagtcccaattactgtggaaactgaggtgggaggatcacttgaacccaggaggttgaggctgcagtgagctgtaaatgcatcactgcactccagcctgggcaacagagagaaaccctgtctcaaaaatgatagatagccagccatggtggctcacgcctgtaatcccagcatgttgggaggctgaggcggccggatcacgaggtcaggagttcaagatcagcctggccaacatggtgaaaccttgtttttactaaaaatacaaaaattagccgggtgtggtggtgtgcgcttatagtcccagctgcttgggaagatgaggcaggagaaatgcttgaacccgggaggtggaggttgcagtgggccgagatcgcgccaaaaaaaaaagatagatagatagatagatactgttggatgcaatataagttttcagcccatattttcgttatataaggatacaacattaagagcaaaatactaagataagagaaatatagagtctaccattagaaattttaaaacttctatttcaggatttctaaatgggctattcaaaagtgaattgaatctcctgtcttttctcttgctttcatttgtgacaaacctgatgtaggtgggaaaaaacctgagcctttgtaatcacatgtttgggtttaatcataactctcatttagtagtagtgtgacttatttatttatctgagacagagtcttgctctgtcacccaggctggactgcagtgacgtgatctcagctcactgcaacctccacctcctgagttcaagcaattctcctgccttagcctcccaagtagctgggattacaggtgcatgccaccaggctgactaatttttgtatttttagtagagatggggtttcaccatgttgttcaggctggtctcaaactcctgatctcaggtgatcctcccatctcggcctcccaaagtgctgggattacaggcatgagccactgagcccagccaaagtagtgtgactttaaattgcttaaactcttttttttttgatggagtcttgctccgtcgcccagggtggagtgcagtggcacgatctctgctcaccgcagcctccgccgcctggggttaagcctcagcctcccgagtagctagaactgtaggcacccaccaccatgaccagctaatttttttttgtatttttattagagatgaggtttcaccatgttggccaggctggtctcgaactcctgacctcaggcgattcacccaccttagcctgccaaagtgctgggattacaggcatgatttccatggcacccagcctaaattgcttaaactcttagagcaagtatctcttctgtaaaattgggataattaaatctgctacaaagtattgtgtaagaactaaaagagataatgaaattatggctcctccctagcacagtaggttttaaatatgtgttatttctctcccccttccccatttacctctgatggaaacttagttgacatctttgaagtgaagtggtttgttggtcagttcttagtttctgagttagctgctactctaagccattgcacagggtatttcttttgactcaagataaaaatgaactgtggaaaaccttattataatatagttatgaagaaggattatttattttcacatgatagcccatagtaatggtgttttgttgatcaggttacaatagattaatatcattatataacaaatgctcttttttccctgttcttttcatagttgttcaatttaatgagaggtaattgattaaattctgtttgcattgtagtcaggaaaccggagagggcagcaaactgtaggagattgtgccccaacgccccacccaggcctccctatcaagacttcacctccactaacctgtctcagtcatttctaacagaaggactcatgtaaattaccaaattactcccaaataaatcagtgtccagaaagatttagttgtttatggaaaattggtagaggattgaaattgtatgacactgttattcatctctcctggacaaggaaatacgaaaaaaaaaaatggaggcattggttgtgttctcgtatactgagaacctcactccctgccccatttctaaaggttacaattccatcttctctttagttttcatcaaatagttttgccccctgtacatcatttttattaatattgataataacaaccaacatcaatcaaatgctttccagagtcaggtacctcactgcattgttactattttctcgttttgtggatgatgacatggtttggctctgtgtccctgcccaaatatcatctcaaattgtaatccccacatgtccagggagggaggtgagtggatcatgggggagtggatcatgggaggtgagtggaacagcatccaccatgctgttcttgtgatcctgagtgagttctcacaagatctgatggttttataagcatctggcatttcccctgctttcccttctctctcctgccgccatgtgaagaaggtccttgcttccccttcaccttccgccatgattgtaagtttcccaaggcctctccagccatgtagaactgtgagtcaattaaaactctttcctttatgaattacccagtcttggggtttttcttcgtagcagtgtgaaaacggactaatacagatgagaaaaccaaggagtgagacaacttatgtaatttgctcattgtcactgctatagactgaatgtttgtgtccccccaaaattcacatgttgaaatacccaaatgtgacgatattaagagacgggatctttgactggtgattagatcatgcgggttaagttctcttgaatgagattagtgcccttataaaaaaaactccaaggagaccccttcctcattctaccatgtaaggacacagagagaagacctctgcctgtgactagaaaacacgctcccaccagacaccaaatctgccagcaccttcatcttccacactccagaaatgtgataaataaatttctgttgtgtataagttatccagtctatggtattttattctagtagcagcccaaacagactaagacagtcacatagccagtgagtggtggagcccagtatcaaaccaggttattctaaattctggagcccacacttcctttctctaatggcataaatggaagctagaaaggcaggaatttagtaatcttcaatgactggctttggcctaatttgttgacctgatatttgcaaattaccataggctaatttaaatctgcctttgtaacttctgctgtgtccagtatcagtttaccactctggtcattctaaattattttttccctgtaaaaaattatttcactttgcctatctaaattcaatccatcttttccatgaaggcttccccatctgcagagggacttcattctattacagtcctatatcactaattattgtattacatgacagacatagctttttttatagtctgtaacctatgtatgtgtgtgaaggagacatcagtgtttgagaaacagcagtgtttggcacatggctaattctggtatatgtttgcctacttccttatcctttagcttgcacactagaaacagacacacctgttttttaatcctagcagctctatttctagctgtaggtatcgagtcaaatcacaaaacttctccatattttaattatctacaaaaaaggaataattatggtatctagtttattgatttacagtgaagatgaaatgagattttgtgtttaggacatagtgaatacttattaaatattagctgccactattataacttctttttttttttttttgagatggagtctcgctctgttgcccaggctggagtgcagtggtgcgatcttagcttactgcaagctccaccttccaggctcacgccattctcctgcctcagcctcctgagtagctgggactacaggcgcctgccacaacacccggctaattttttttatatttttagtagagatggggtttcaccgtgttagccaggatggtctcgatctcctgacctcgtgatccacccacctcggcctcccaaagtgctgggattacaggcatgagccaccacgcccggcctattataacatttttagtaaatattcattgttatagattatttgtattactagattacaaaatctgtaatcccccttatgcacattataagcatttagtaaatgttgagttttttgtttgtttgtttgtttgttttttgttttgaaacagagtcttgctgtgtcacctaggctggagtgcagtggcgcgatctcagctgattctcctgcctcaggctgctgagtagctgggattacaggcatatgccaccacgcctagataatttttatacttttagtagggacggggtttcaccacgttggccaagctggtctcgaactcctgacagcgtgatctgcctgccttggcctcccaaagtgctgagattacaggcatgagccaccacacctggcctgagttgcttttttaaaataaataaagatttaattcacataccatcaaacttgtcaagttttaactgcaggttttaactgcaggatttaaccaagtgccctgctgtaaactgccagtatataacataatgcaggcatgtgaggtcccattggaaagggagttatccaggctgggagaaaaacttgagagaaatgggcacttgcatgaaatcctattgctgttccctaaacctaccctctgatcttatgaaaaaacgaatatcatgtgaaatgatttcatttcatttgattgttagtgaaatgttttaaataattatttgaatgctttagaaattaatgtatcgttatttgtaattagaattcagttgtgcactctgctcaaaatgagacaaagtgaagcattactcatgttttcaggtaagtatgaaactcttcattttgagtgataacaaatatcggtgaatgcttacaagcacttgaaacatttacttttggttaggtaaaatttaatgtgaatgtgatggcggtggattttagtttcaaatgaggtaaaaagctgaattgttaaagagttgcatctattctttcatagtctggaatctacctcaccctcattctttgtggtgagttgcaaatgaggcagcaagatacccagcatacctgttaagcaagtatttatgtcccactggtttttctttttttagtttaatgctaggttttttttttctttttttgaacaatctgttttctgaggttttgaattttcctagcaactgctaggagagataggaaggataatgagctgaatggctggtattcaacacaagaataatggtgttctttatttacctttgcataattttaaagagaacaagtttacttatcttttacttgttcttttcccattgtaaaaactcagtaggtgttactagactattctgaaatacaaattctgaaaagctttcttctgatatttctatggtttctcattcatattttctcttttgttacctcacttagagcacatgggctttgtaatgtacactgctaagagtagatagaaacctgcttggaatattgattttctgtaattaagaatgtatttatagaattttatctttcttatagttctattttttttttttttaagaggcagcatcttattctgtcacccaggctggagtgtagtggcacaattgcagttcactgtagcctgaacctcctgggttccccgcaaatagctgagactacaggaacttgctaccatgcctggctgatttttcaattttttgtaaagatgtagtctcactatgttgcccaggctggttttataatactgggctcaagcagtcctcctccctcagcctcccgggattatgagtgtgagccaccacaaccagcctttcttatagttatttatctcactgtgaacactgtgaacattttgtcattttggagatccttaacattgagtcatgtatactttgtgaatgtttgcatagagttacctaggaacatctggaagaatgttcatgaaagattagaggagggccagtcatgcaggaggaacagtttctccagggtgctacccatctatatgggggttgcagaagacctttctgccctctaaaccatatttcctttttttatttctttgagacagagttttgctctgtcgcccaggctggagtgcagtggtgcaatctcggctcactgcaacctctgcctcctgggttcaagcgattctcctgcctcagcctccagggtagctgggactacaggcacacaccaccatgcccggctaatttttttgtatttttattagagacggggtttcaccatgttggccaggctggtctccaactcctgacctcgtgatccacccgcctcggcctccaaaagtgctgggattacaggcatgagccaccgtgcctggcctaagccatatttctcttgtagttgttttgtctttctttctgtctgatcttgattttatgggtgacgtgatgagaatattcaacaagtagaatatgagatataggaaaaaggtcttgactgctactctcctgagttgagataattttttttttttttttttccgagatggaattctccctctgtcgcccaggctggagtgcagtggcacaatcttggctcactgcaacccctgcctcccgggttcaagtgattctgcttcagcctcctgagtagctgggtctacaggcgcgcgccaccacgcctggctaatttttgtatttttagtagaggtggggtttcaccatattggccaggctggtctcgaactcctgaccttgtgatccacgcacctcgtcctcctaaagtgctgggattacaggtgtgagccactgcgcccggtgaggtgagataatttttatacttgctgctttgactgatgtataaaaaaatgctactcccataatgcaactactttgctgcattggagagaacacaatagaaaaatagccacttcttattcaagcttttcttgatttttgtttcggctgtctctaaatttgacacttgagaatagatggtttatttgactcatagtatgacccaggtatgcttttgttaaaaagaacagttctaggaggatgactgttgggacaaaattagctactagtatggaatactctttcagtgtaaaatctcagaacaacatttaaaaatcattggagatattttattcataaacattttcttaataagatccagaaagggtttataaacctaataaacctattcgataggttctatcaaataaacctatttctatcaaataaacctatttgatatcttctatcaaataaacctatttgataggaggaaataggaataggacacattgcttttgactttctatacccatgtggaaaccaggaatctattctctccctctcaatttacatgaccatgaggaaactgaaacctagcgaagttaaatgacttgcccggggacggacagctagctagttcctgcttgaactgaggaccatctatttggttaccgggagtgtggctggtttctgttgcctgttttgatactcttctcctggtaagttttagcttcaaatggtattgtccacaccacagcccttgatctcaggtaattctccacaccactgcctttttttttttttttttttttttttccaatgcagttgcgtggtgtgaaggcgataactgcagacactcaggtgtaaacaacccagggaatcaatgggttggggggatggtaaaacaggagttcgtagacaggactgtgtacaatagcttctgaagttttggagggtattggtgtagctgttatttctgagaccggagaaaatgacggtagagtgacagtttctctaatcatcagttttcaaagagtatgtttttcgttggaaccacaaatatagtacacttaataaggggaaacgaaaccttgaatttttccttcccagactctgaaaagtaaagtaaactttaaggaacattttaagggtgacaaaaggtgaagattgcaaatcaaacttagagtgtccctgctcaagaaaatctgtgcactgcagctacaatagaggaccacttgggtttagaaatgacatgttattaataattctagtcactgtggctaattagaacaatctgttgaaggttataaattatagaagctttttaaaacatttatctaagaacctgtgtagaattctaaaaggactgaattatttgaagttattagtttctgtgtatgtaaacttaaactatttttaaagcctttgattatttttctaaaaatgtttttgcatgcttatagcctgatgccgtaaatgttttatgagtttaatgtacagcacctctaggtgctatttaaaattgttttttctggtccttttcttttgggttataagggttcttcgtaaccaagaagattacctatggttacgctgaatgcactctcccagggtgcataggcgctgctgaactgcggttataactcttgtttgcccctgggtggttgccagcagggagtaaggcattgtgggaagtactttctttaccttccacaacaggtgtctttgtcagtgcaccttattcagatatccatgtgtggaagctctgagtcactgaatagcaaagaaaaatatgaaagcaagaggaattgctttcacatctagaaaatgttgcaagataatctgaaatcttctggtgctggtgaatgcatgaagaggttcacagtatcttttaaagtacttctgaaaagataaggagtttaaaaggtatgaactgcctggacaccttataatgccttgtctcctgattatcatttaatttttacctggttagtcagagtcaggataaatgtgcaggaaaaaaatgttaacgaaaataatgcttaacagacaaagcagcactgtagaacaaaaatgaagtaaaaatgctttactgactccaacaagggtcaaacacagtttgaagctgttttaatcttgtggatttatttaaaatattgcatttttttgtttaaataagcttattagatttgcttgtttcctagcaatcaggtgcttttccctccttccttgtgctcgctcttataagctagaatgctatagcagttgtaaaactctactaattacatttaaatgggacaaggtgttatacaagtaatcatgttaatgtagatgaaaaaaatacttttggaaaacatgggaaaataacactatagatctcattctgagttttgttttctgaaaagcaaacaaatttaggtaacataatcctgctattggtaatgaagactaaacatttcaactggttgaaatgttttatttcaacttatttcttttgattttagacgaacttgccaaattaatttctagttctaacaaagaatatttctcatagtaagtactgcagtgtcatgatctagaaaaagcagggaagatactagcttaattaggaatattgaaaaacaacttcagagaagccttatctgtcttccccttatttttatttgcttaatcctttttccatgaaattagtatacattatatttcctgatcaagcaactttgtaatggtgattatgggcaactttcaaacttttcatctggaaatatggcagttcatttatggtctccagctgtaatttaaaaagcactactggtggttaagctaccaacagttaatggctatctactgatttgaataattaaaagaaacccctagccttaaagataaaagatgaagagaacttttatctatgggagcaaaacaaccagtttataaatgagactcttgtattgctttctgaataacaacacaaaactatgcttaaaatacttattttttttagtaggaaaagggagtaatgattattaattgatatcgctgtccctgtttcatttttatgttttggcatttttttctttaacagaaatactcagaggggaaaattttttttttcagacttcaggagatcacttgtactatgaattctttaaattctgagaaattaaaatggttttcatctgtttattttctaagattacgaaaaaataagcgttaagaacactaagaaaatttacttcttctccaagaacaatcttcatgtaataatactgcagtaagaagatgagctattatgaaaatttttaattaccaagaacataacacaaatcagttttttttgttgttgttattgctataggatatttctagttaggaaactttatttcttttttgaagtttaaaggtttccaaaaattgaattttccagcttctctgttataaatgcagaaggtgtttatagtgtatacttcctgcatagataagaaacctcttttagtttcctactgggggtgaattgctagccaagcctgtgatagcagccgctttttttttctttctctttctttctttctggatttttgacactccaccccctcgaactcaggtgggtgtgtacactggcactgagctgcagtaggatttttccttggatagtctggtctggagctgggacagcagctgctgctgtggaaaggccagctggcaagatgatggaagaaatctccattatggtagcctatgacgcccatgttttcagccagctgcacgatgaagacttcctcactagtctggtggccatcagcaagcccaggtctatggtaggtggtgccttgcacactactctggttctgtattttcttttctaacatgatatctatactcctgtagcaactgaggcataacttgctgttggctttgtgttatgtctacaggttttcaaagatttatttacataattaaacactcatataacagtagcacacttaaaatgttaggctgatgctttcatatataatgaggttgagaggaattttagagtgccaaatatcactttgtcttaagtttctgccttgtaaatatgtatataattatcaggtaggggctagttatatttacatagcatacaattgaggctcatagaagtgtaacgtttctaccagtgagtaataacatcatctgagaattgagctacctaaacatcaggtaactttcagggtcttaaattattactaagaagaactattaggaaaataacagtacaattttagtttggctttaatatttgtaaaaaaaatttgccattctctcaggatcttagtgtgtgtgcatgtcctggcataatcaaaaacggaagttcttgcaagtgtttattgtttcttctcttagatgtcatcattataatggctattgagtttaagatatcaacgatctatacctctgaaaccaacttttttttgagatggagtttcgctcctattgcccaggttggagtgcaatggcatgttcttggctcaccgcagccgttgcctcctgggttcaagcaactctcctgtctcagcctccctagtagctgggattacaggcatgcgccaccatgcctggctaattttgtatttttagtagagatggggtttctccatgttggtcaggctggtctcaaactcctgacctcaggtgatccgcctgcctcacctcccaaagtgctgggattacaggcataagccaccacgcccggcccccaaaatcaactttttaactacaattgtagtaacttcttattatatttaatatgactcatcacaaacaacagaatgaaagagtatatcataacatttaaacctaactaatatgaagacctacttctctattttaaggcacaggaaccttaaaaacatggctatttcttgaaacaacaaattacaaaaaataaaaataaaaaaataaaggagaaagctatagattgattttaaaagacttaagggttatatcaaccagatgcaataaatcaacgttgtttaaatgctaatttgaacaaagtataaaaagaactgtaagataattgagaaaaatttgaatttgaccactcattaggtatttaataatgatattaagagaattatgtaattttttgtgcattgtttttttttttttttttttttttttgacatggagtctccctcttgttgcccaagctggagtacagtgacacgatttcagctcactgcaacctccgccttctcaggttcaagtgattctcctgcctcagcctcctgagtagctgggactacaggcacctgccaacacgcctggctgttttttttttttttttttaagatggagtctcgctctgtttcccaggctggagtgcaatggcacgatctcagatcactgcaacctccgcctcccatgttcaagtgattctcctgcttcagcctcccaagtagctgggactacaggtgcacaccaccatgcccagctaatttttgtattttagtagagacagggtttcaccatgttggccagggtgggctcaagctcttgatcttgtgatctacccgcctcggcctcccaaagtgctgggattacaggcgtgagtcacggtgcacagcctttttttttgtatttttagtagagacggtatttcatcatgttggccaggatggtctcaaacttctgacctcatgatccacccaccttggcctcccaaagtgctgggattgcaggtgtgagccactgcacccggctgatactatgatttttttaaatggtcatttagagatatatattgaatagttttggatgaaatgtctgcagagattcaaaatgaaccagtagattatgtgttgataattattgaaactgggtgataagtattaatacatagtgattcattatattctctccacttttgtagagatgcagtttaaaagaatcagctggaagacaaaaaaaagcaaaaagatttgcaaaaagcaaaacagatataaaactgtaatataatcaataaaactgtaatatactcagccaggtgtggtggaccactcctgtagtcccagcacttcgggaggctgaagcaggcagatcacttgaggccaggagttcaagaccaacctggccaacatggtgaaaccttgtctctactaaaaataacaaagatcagccaggcatagtggcgcatgcccataatctcagctactcaggagactgaggcatgagaaatgcttgaacccaggaggtggatgtcacggtgagctgagacagagcaagactctgtctcaaaaaaaaaaaaaggaaaaaaaaacaccataatatctttctggaagtgttaatagagaaacatctgacctgttgcatgctttccttgtataatatacataatttatgtttttataattacatatattatatgaagattattgccaaccccctagttaactacaatatacactataactgaatcaggataggataatccacggttgtagataatctttaaattttattttagtcattgattttacaatattccaacatgaaagcttatccagagaattcagaatatggccacgtgctgtgactcatgcctgtaatctcaacactttgggaggccaatgcaagaggaagaggattccttgaacccaggaattcaagaccagcgtaggcaacatagagagacctcatctctacagaaaaaaaaaagaggatcttgagaggaccatcataaataaacagaattctctttttttttcttttctttctttccttctttctccctccctccctccctctcttccttcctccctgcctctcttccttttttgagacaaggtctcaccatgtcaccaaggcctgagtgcagtggtgtgatcatagctcactgcagcctcaaagtcctgggctcaagcagtcttcccacctcagcctctcctgagtagctgggactacaagtgcacatcactgcccccggctaatttttttttaaagaggtagggtcttgctatgttgcccaagctggttttgaactcttgggctccagcaatcctcccacctcagcctcccagagtggtgggattacatgtatgaaccatcacacccagccaagagcctcttaagaggtctgagctgagtcttcaaaaactaacaggagttttctaggccaaaggagaaaagaaacaaatacagagatgtgaagcagcagagtatagaggacagtgatggctgaagaggtggacagtgaccaagtcatagggaacatcctatgctcaataagtataggacgttgtgtgtttgtatgtgtatggacgcaggcacataagagactgggagggagaaaaaaatgaatgaattaatataaatgtgcttatcaggaaacactcttccatttgtagattgtgtgtatattatggctcaatgcaaccctagctgcaccaaagggaattcccactcctaaccctgtagctcatttttaaatagaatttgttgactaatatggaaaagccttggagttctgatagaaacacataatattgttttatatatcaaacttttaaataatgcagatcttggggtattataaaactttctgaagatatttagttttatcagatttgaaatttaaaatcgtcttttggaggtaatatttgggtttggttcatctggaaaagttattctaaaattgtgcaagataaaaatatatatcatttgcttttttttttttttttttttttttaaatatggagtctcgctctgtcacctaggctggagtacagtggcacgatttgggatcattgcaaccttcgcctcctgggttcaagcaattcttctgcttaagcctccccaatagctaggattgcaggtgctagccaccatgcccagctaatttttgtatttttagtggagacaggatttcactatgttggccaggctggtcttgaacttctgacctcaagtgacccgcccgcctcagccccccaaagtgctgggattataggtgtgagccaccatacctggcctcatttgcttttaattccatgttgaattttttgctttgagatgaacattttttcatcaaacattttgtttttttgttttgagatgcagtttcgcacttgttgcccaggctggagtgcaatggcatgatctcagctcaccgctatctctgcctcccgggtccaagagattctcttgcctcagcctcctgagtatctgggattataggcatgcgccaccatgcctggctaattttgtatttttaatagagacggggtttctccatgttggtcaggctggtctcgaactcctgacttcagttgatctgcccacctcggcctcccagagtgctgagattacatcaatctgataactgcactgtgaagcaaattacactcttgctaacttataaaatcctccttaggtttgggttcattattaagggtatttagaaactttcttagtacaggcttaattaaatatctttctgtaattggactttgttgcataatgggaggtgttttgattccttgaatggtaaaaatccgattaaatacagtggttctcaggtgtggatactgcatttttttcttattcataagtaaccctgtgtctttcttatgtttttggtaggaatctgtagtaaaatataccttgcaagctgttacatacacaaaactgaaagaaaatttgactaaacaatacctgctgttgccacatgttatgtatgaaggggatttttctgttttattcaatcgtttaaaggctttaattgtttatgacccactaaattgaattcagaaatctctctatccacactttggaaaatatgattatatcctattgagtccttaaaagtaaatgttgatgcaagaaaatcacagacccctttacataaattacagataagaaaaaacaataaggaagccaagcataacttcttatgtcttccatatcatacacacatgagcaaactaagaaattacctagaccaatattgtttactgtgataacctaaacaaaagcctagtcactactagcagaacataagagcttttttttttttggagacagagtgtggctctgccacccaggctggagtgcagtggcttgatctctgctcactgcaacctccgcctcccaggttcaaacaattctgcctcgtccttttgagtaactgggactacaggcacacaccaccatgcctggctaatttttgtatctttagtagagatggggctttcaccatgttggccaagctggtcttgaactcctgacctcaggtgatccacctgcctcggcctcccaaagtgttgggattacaggtgtgagccaccacgcctggcctctactgggggttttaaagttacacagttctcagttcaagttttagattcgctacttaccagtgagctaagtaacttctctaagccttggttttctcatctgaaaactgagagacataatagtattacctcattggaataccatgaggttatttgagagcacttgtaaagtatttagcacagtgaaagctgtaactaattgtctccttttctaataagggaggaactaatcagactatttgaagaaggtctaaaggaagaagtgggatgaatagataaggcaccctggagacgcaggaggagttgggaggacaaaaggagaaaatgaactagttgggttaccctggagaattactttgcttgattagggaatcactatcaggataccagtcctacaggaaacttgaagccttctgccctgaagatggtgctgaagatcttaggtttgagctcagaagggtgggaaggcaatgtagaaccaatagaagggagtatatataggccaaaccttctgatgagtagatgagatcaaattactgcagcaggaatcttgcagtaatgaactggcagggcccacattgaccaaggaaaaaaattgtaaaggacattagagcaatgcaagtaaaaagagatgacaagtgtctggacttagacacttgacagtgggagtgtaaatagagattagtctacacatgttggttagttctcacaaagggaatatacattaatattatttaggaagaagcagcaactgatgttatgagaagagtaaatgattgagataagttgaaaattaagttccagccatacaaaagtggagattgctatagtgtcaaaagtctttgggaatgggaaagttaggttatcaagaatagaatggaggaaaaatgacccattctggctttaccatgttccacatctagaaattcaaggtcacagtatcacggtaagagaattgattgtccagtggttagaacactgccctttaacaaaagccatttaatcagactaacacatggctatactatattggcactggatagatattcttcactgacagaaaccaaaatagcagcactgtgccagcaaaggaagggagctctttcttggagctacagtttctctttctataaatgggagacgagggtaagcattctgtaattacttcctccttatcggattggcacagatttcatcaagcatgccaaattaaaaaacaaaattcagagcaattccatatgtcagagatggagaaaacaataaaatcaatactgttatttctaaatctttactagatatacatttcaaatattgattagaataaacataacaattaagattcatccatattttttaaaaatgttatctgaatattttttattctcattgttacatagcaagtgcacattttggcactatatcaatttcagttcagttcaagcatccaaccaatcatttggttgatcagttctaatgagttaaggttcttatagttgcaagtaataaaatcttgtgctatcttaaataagaaagggattttatcacgtggacagcaaagtgtgttcctttaaatgcaagggcagttcatctaggcaacagagctggtactggactgatgctggcaaccattctccctatctcttgccatctaattaaaacttctctcttgacatctactttatttctctgtctccaacttcttggcttctttatttctatggcagaatattgctgctacacagcatccagatttatagttctaccatctgaatcacaactccatatttctttggtgagaatctgaccgagtaatgttaggtgagttttgtgatagtatagagcagagcccctgagcacacactcaaactaaactgcctgggtccaatcctacctcacttgcaattagctctatgactttgggcagattacttaatctcaaacctcatttttctcatctgtaaaattggagtctgcaagagaaagtagtccggactgaaatcggccagaagtccctctcatgttatatctaaagtaaacctatctttaactgccaagctgtgtttcgtgtttctttcctctttctttaactcttacagaatcatgttagtagtacctgtaagattaaatcaaaattaagtttaaatttaaattaaatcagtaatatatgtaaagcacttaagaaaattaattgtcaatatatgtaaagcactggatacctagcacatagaaagtggcatgtgtatgttagttattattccaaattgattcttttattatttatgaatgaatgagacaaggtctgtcgctcactgctgcctcaacctcctaggatcaggtgatcctctctccttagccttccaagtagctaggtgtacaggtgcatgtcaccgtgcctggctaattttttatttttgtagagatggggtttcactgtgttgaccaggctaatctggaactcctgagctcaagtgatcctcccccctcggcctcccaaagtgctgagattacaagcgtgagctaccacacctggcctggttaacagaaatttaaaatgatgattaagaccaggcgtagttgctcacgcctgtaatcccagcactttgggaggctgaggcgagtggatcacgaggtcaggagatcgagaccatcttggctaacacagtgaaaccccgtctccactaaaaatacaaaaaattagccgggcatggtggcgggcgcctgtagtcccagctactcgggaggctgaggcaggagaatggcgtgaacctgggaggcggagcttgcagtgagccgagatcgcaccactgcactccagcctgggcgacagagcaggactccatctcaaaaaaaataaaaacaaaacgatgattaaattattagagaaaccaattttttttttttttttttgagacagagttttgctcttgttgcccacgctggagtacaatggcatgacctcagctcactgcaacctgtgcctcccaggttcaagcagttctcctacctcagcctatgggtagctgggattacaggcatgcaccaccacgcctgggtaattttgaaattttagtagagagagggtttctccctgttggtcaggctggtctcgacctcccgatcttaggtggtcttcccgccttgacctcccaaagtgctcagattacaggcgtaagccaccgcgcctggcgagaaaccaatattacatcaaaactcaccacagtgcgcaagctgaacgtgtaatcaaattgtagtactcaaactcattgcaaggacttcaagcttatttacaaacaggatttacagcaaacaaaacagtgtagccctgtaattgtaatgcccacaataggatttctggcaggctgaaatacagaagccctcttatccgacacagtcagggctgtagttggtttatagaaaaagttggttcaggagaagaaggataaaaattgctacatactaacttaaacatttgtttttacttaaaacttccattatcaattttgctttaaggcctttaatgctctttgtttgcttcggaattctgaaatccatatgccttctagtttcagtttccttaagaggggcagtaaattaataaatgtgtcaagcagtctaagggcaaatttgatagagattttcataacttttttctttacattttttatggcagcattgccaccatttaattcttttttttttctttttttttgagacagggtctcattctgtctggcgtgcaatggcgcaatctcggcttactgtaaccttcgccttccaggttcaagcaatcctcttgcctcagcctcctgattagctgggatttcaggcatgtgccaccacgcccagctaatttttgtatttttagtagagatgggatttcaccattggccaagctggtttcaaactcctgacctcaagtgatctgcccaccttggcctcccaaagtgctgggattataggcgcgagccaccacgcctggcctcacgctttggcttttgtccatgttccattgaccaaacaaatcaaaaggccacttccaacatcctggagaagaaaagggtactccacaataggagttgtgggaggggaaagtgagtatttgctgaacaatagtctaccacatatataattgacctaactgacccttcatatgatcaccatggttaggttagctgtgtaaaatatataagcactgtgtttctcaatagtacacttatataatattcacaaaaattgcacatgcacagattcatcatcaaaaaatgacatatactcattgaaaaatgagataaaattgaaaattcagacttaccagtcttttaccattattcattttactggaaactttaaagtgaattggcactcttttttccccatcccttccaaaggtaattaagaaacagaaatctcttgccaatgtttctagggtatgccaacattgttatctcaacctgatccatatttatagcccagggatttgcaaaaacttggggggggggtcatggattcctttggcagtgtagttaagtccatggaccccttatcagaaaaaaatgtttttaaatgtgtaacataaaatagataagactacaaaggaaatcaattgtatttaaatacaattactaaaataggccaggtgcggaggctcacactgtaatcccagcactttggaaggctgaggtgggctgatcacttgaagtcaggggttcaagaccagcctggccaacatagcaaaacccaatctctaccaaaaaaatacaaaaattagctgggtgtggtggcatgcgcctgtaattccagctactcgggaggctgaggcaagagaattgcttgaacctgggaggcagaggttgcagtgagctgagatcacgccactgcactccagcctgggggacagagcgagacttcatatcaaaagaaaaaaaaaatacgattacaaaaatagacagaaatcagatttatgatatggtaataagtacttctttattaaacacattaaatagcaagaaatggtagtgaggctactataaatgcaaaataattttgagatatatgtaatacatataatgtgaatgaaaatatctgtggtatctataggtggcaaaatcacaaataacacagtggattattggctacatttataatggaaggaattgataaatttcagttagaggttcaggaaaatagtttttttccatctaagttcaattcaatgaactccctccacatacccctaatataacctttatctgatactgtctgagacacaaagatttttacaagtcttttctttccttacagtgggctaggagaaatcttgatcatgccttccactttctctcttcctcttaatggtatagaaaattacttgtgtgattatttaatgaatctctcattaacctataacttccctatgtcagctttttttattttggaaacagaatctcactgtgtcgcccaggctggagttcaagtgattctcatgcctcagcctcccaagtagctgggattacaggtgtgcaccaccacgcccagctaatttttgtatttttttagtagagatgaggtttccccatgttggccagactggtctcaaactcctgacctcaagtgatccacccaccttgcctcccaaagtgctgggattacagacgtgagccaccatgcccggccagctatttctgtttttaccattgtatttccagcccagcattgtgcctgggggaattatacacactctgtacatatttaatgaatatattgggggaagatgaaatcccacatagttacaatcataatcttcaatatgtttgtgacaattaaatacattcatgtgtgtgtgtatgcataagatatggaatttatttttaaatctttttatccttagacccatatactaagttcttatgattgtggaatcaggttagagtctagctgagtacttaattagctcttttgttttctttttttgaatttttgttttattttttaattttaattttaactttttttttttttgagatggagtctcgctctgtcacccaggctggagggcagtagcatgatctcggctcacttcaacctccgcctccggggttcaagccattcttctgcctcagcctcctgggtagctgggactacagatgcctgccaccacaccaggctaatttttgtatgtttagtagagacagggtttcaccatattgggcaggctggtctcgaactgttgaccttgtggtccgcccgcctcagcctcccaaagtgctgggattacaggcgtgagccaccgcgtccggccctgttttatttttatttgagacaggttctctctctgttacccagtctggagtgcagtggcgtgataatggctcactgcagcctcgaactcctgggctcaaatgatcctcctgcttcaacctctcaagtagttgggattataggtgcatgtcaccatacctggctaatttttttgtttgtttttttttgtagagatgggggtgtctcacattgttgcttaggttggtcttgaacttctggcttcaagcaatcctcccacctcagcctctcatagtgctggggttgcaggcatgaaccactgtgaccagcctttctattcttttttgagatagtgtctcttactctgtcacccaggctggagtacagtggtgcaatcacggctcactgcggcctcaaatgcttgagtccaagtgattctccctcctcaggctcccaagtagctaggactgcaggcacataccaccatgcccagctaattttttccttttctttttctttttgtagagagggagcctcactatgttgctttggctggttttgaactgctgggctcaagtgatcctcctgccttgacttcccaaagattacaggtgtgagccaccactcccagccttaattagctcttaactgtttcaaaaatcaaacaaacgaacaaaaaaatgcagtgattatttctgttatacttttatttagtggttcatttaacatgtatacctcctacgtgcatagcactgtgttaagctttgagacatcgtcaaagagataacagtccagtttgggagacagccatgtaaacagccgtgtatgagtcagtgatgtgagcactgttagaaatgtgtaggtgctgtttgtcctatatgctcctgtcacaccttgcaccctgtgaactaactgaaatgggatattctatctgcttttctgagttgtacactgaagttcattttccttgtgggttgttttatttcttctctctctccctaccatagtacctggcacatagtgtcagcagccagtaaggttctaattattgaataaaggaatggtggagataattagagatattttcataaagatgtagacactttttaaagtacaggttttgatttttaagctcttacaattttactttataaataatacatgcacacagtatcagaatttcaacaaatatgaaatgatatccagtgaagttacctacccattcctgttttcccagcagttttagtagttttttttagaagtatccttctataaatatttttatacatgcaaacaaatttatatgtgttctcttttttcagagctcttggtggcccttttatgttctgtactttgcttttctcacttaacagtatgtgttgatttttctatgtcagttcatgaagggtgtccttgttcatttgaaagctacatagtatttcactgtatagatttctataatatgtgtaaccaactccctcccactctgtgagtgtgtaggttgttttcaatattttgctcctacaatactgcagtgagtaatcttatataacatttcacaaaagtgtgtgagtatatctgtagattaaattcctaggagtggaactgctgggttgaaggatacattcatttgtaattttgatagataaggccaaattgttttccttaaaggttatattagttaatataactaccagcagtgtatatctgtgcctatttaaaggtggaaacttttgaacaggaatctaagaaaaaataggaatttatcagattgtcaggggacgggaaagatgttccaggcagaaggaatagcactttgagaggcacgggatagaaagatggcacaagaggatttttaacttattccatctggctaaaatgtagggggtaggccaggaaatagagagtgggagttgatcatgataggttgtgtatgtaatgctgagtaactgatattttaaattctataaatgaaggttttgagtagggaaatgatataataaggttgattaatgtattttattaaaagaatagctatttgtgtgtatttatttaaattgaagtttgccaaaaaggtgtagtccctaaagatttttcttgctttttttgtttgtttatttggagacagggtcttactctgttgcccaggctcgtgtgcagtggtgatcagatcatagctcactgcagccttgaaattccaggtttgatcctcccacctcaccctcccaagtagctggtactacaggcacatgccaccatgcctggctaatttttaaaacattttttgtagagatagggtctcgctatgttgctcaggctggtcttgaacgcctggcttcaagcaatcctccagcctcagcctcccaaagtgctgggattataggtgtgagccaccacactcagccttttcttggatttaaatgaggttttctttttactaaggattcaaataatatgttgactatagaaaattttgaaaacacatagaaataaaaactgaaacacagaaagaaaatacagaagttactcataagtttactactctgaggtaatctccctatccaaataattcctgttgtctataaaacaataaaagaaaatcaatatatgtattaggtgggttagaaaatacaaagtgggccacagtccgggtgggcatggtggccgcagcggtagctggagcctctgcgactacacctccaaccggcctggagcccgtggcttccctggctcctgcaagcatctcgcgtggtggctctggccagctccagcactcgggttgggccggatgaccagaggcctgtagctaccagctgccctctcccgcctgggctcagccgccacccgtgagcgaactcagcccgggacacagcacacttatcaagtgggtcccatttttagccacttgctatttcagccattgctgaaaagtctagtgggaaggaaccaactggagagtcagagggagaaattagtttctatttccagctccaccactataatccctggttgaagaaatatgaatatcaacacgaaattgttcatcagcgttatttgtgccagctttttcaccttccagcttcttttctactttgtaagttactggttttcacaaaagtttctccaagtttcaatagtcttagctttgaaaagaagattgaatggaactcaagggtggtatttacatgccattctttggtggttggtgttcttggcctgtacattttcttatttgatgaggctgctaaagctgatccactttgggatggtccatcacttgcaaacgtgaatattgctattgcttcaggctacctcatttctttgttttctttcttttttttttttttgtgatggagttttgctcttgtcgcccaggctggagtgcaatggcatgatcttgactcactgcaacctccgcctcccaggttcaagcgattctcctgcctcaacctctcgagtagctgggattacaggcgcccgccacctcacccagctaatttttttttttttttttttttttttgtatttttagtagagacagggtttcaccatattgtcctggccccgaactcttgacctcatgtggtctgccagcctcagcctcccaaagtgctggggttacaggcatgagccaccacgcccagccaggctacctcatttctgatttgtccattatcattttgtattggaaagtgattggtgacaaattttttataatacatcattgtgcggccctgtgtgcatactgctttatactgatattagtgaataagaagtttaatttggcataatttcttcaagaatcagatatatcgaaacatctctccagaccacccatttggaatcacgatataaataattataaatgttttaaaaactgcttcagttctcttggccactgaaatcacaggcttagcctggctgtgcgtggattggcaagctgaatgtttaattatgtggggtgactattattttctctttggacttttatgcctttaaaataaaataaaataaaatagaaaatacaaagtggtttccaaagacaatcacttgttaagagattcttgtgattcctcctaggaagaaagaaaaaaacaaaagtgatgcatatacctgcataaattacagcataattgttaatgtagagctgtacaacaaatatcttctctttaaatatacgaatgtcttttaaagacagaaagaactgttttattttctttgagggcctcactacaagccttttagatagatccagataacatgttctactttccctctttgcaacacttcgctagcaggtacttcctaatcaggatcttgacaactatcagccacatagaatacttggaaggaggttaacttttcatactcaaaagctctcttctggaagaatcctaatattattaatagcaagtcttccacttgtagggcctgttggaacagtttgtgacaaatccttcccagactgttctttgagtatacaaattaatatctccaagtcactgatactctgagcacatgcatcctgctgctagggaagtgcattaaggtaccttcaaaaccttttttcctctgtaattacatcctaaaaattacactggagggtgggctggggtggagggaaggtcccaggtgcatttactgagctatctgtcaaagtccaccaagctagtagattgtgaccacaattttgataatttcggattccatatctgcaaggcagtgttaaaactacacaatacctgataaatgctagaatgaggataattcctctaaatagttaacatttaaccagaagctctacagtgctctccaacctaacagtcacacattaatttattccttcatgtaaaagaatcatttttattgctgctgcctgaaaggtacaaattgcttgggtgtaggctgctcagcttccttcttactaaagagacaggaaatatatcttccatttaaagtgttaatggcatctataaatgtgtagtccaatttgttattgacttgaactcttcaaagatttgagaaacaaggtttaactttagcactcaagattgttacacaagaattaaatgttttcaatgactaccttttgtagtgttgggaagggtgcaaaaaggaaagagaaggctggaaaataaatatattttatctaagagggcatgactgagttggctaagctttcaatttcatttttctcttaggaaagactttcacctattatgttacaatgtgtgctcacatttcctgattatggatcgaaatggagcttggagcactacatttggtgcaggagaggactgtcgagactagaaccaagttgggttttttgttgtttttgtttgtttgttttgttttgttttgttttgtgtgtgtgtttttgagacagttgctctgtcgccctggctgtagtgcagtgacacgatcttgactcactgcaacctccgcctcccaggttcaagccattctcctgcctcagcctcccgagtagctgagattacaggtgctcaccaccatgcccagataatttttgtatttttagtagagacgagatttcaccatgttggccacgctggtctcaaactcctgacctcaagtgatctgcccacctcggcctcttaaagtgctgggattacaggcgtgagccaccgtgcctggccccaagttgtttgttaacagacacctgccaaaagacgaggacttcctctgaacccttatcaggtcaaaacatggtagatattctactaaaattggtcaaataagtaaatgaaataaatgaatgaaaattattcattctttcaagtttgtttggagaaaataatggaaaccattcaacttgagaataaagtgtttaaaatatttataggctgtacaaatttgaagtgctattagtatcccactattaagtgccacttgttacattcccctagataatctagaaggggcaaacaaataaaaataatttaagacaaaagtaataattccacccagggtgaaatggcattcagcctattctaattctttttttttttttttgcttttggaagtttttttttattattatactttaagttctagggtacatgtgcacaacgtgcaggtttgttacatatgtatacatgtgccatgttgatgtgctgcaaccattaacttgtcgtttacattaggtatatctcctaatgctatccctccccactccccccaccccatgacgggccccagtatgtgatgttccccttcctgggtccaagtgttctcattgttcagttcccacctatgagtgagaacatgcggtgtttggttttttgtccttgtgatagtttgctgagaatgatggtttccagcttcatccatgtccctataaaggacatgaactcatccttttttgtggctgcatagtattccatggtatatatgtgccacattttcttaatccagtctttcattgctggacatttgggttggttccaggtctttgctattgtgaatagtgccacagtaaacatatgtgtgcatgtgtcttgatagcagcataatttctaatcctttgggtatatacccagtaatgggatgtctgggtcaaatggtatttctagttctagatccttgaggaatcgcctcattgtcttccacagtgggtgaactagtttccagtcccaccaacaatgtaaaagtgttcctatttctccacatcctctctagcacctgttgtttcctgactttttaatgatcgccattctaactggtgtgagatggtatctcattgtggttttggtttgcatttctctgatggccagtgatgatgagcattttttcatgtgtctgttggctgcataaatgtcttcttttgagaagtgtctgttcatatccttcacccactttttgatggggttgtttttttcttgtaaatttgtttgagttctttgtagattctggatattagtcctttgtcagatgagtagattgtaaaaattttctcccattctgtgggttgcctattcactctgatgatagtttcttctgctgtgcagaagctctttagtttaattagatcccatttgtcaattttggcttttgttgccattgcttttggtgttttagacatgaagtcgttgcccatgcctatgtcctgaatggtattgcctaggttttcttctagggtttttatggttttatgtctaacatttaagtctttaatccatcttgaattaatttttgtataaggtataaggaagggatccagttttagctttctatgtatggctagccagttttcccagcaccacttattaaatagggaatcctttccccatttcttgtttttgtcaggtttgtcaaagatcagatggttgtagatgtgtggtattatttctgagggctctgttctgttccattggtctatatctctgttttggtaccagtaccgtgctgttttggttactgtagccttgtagtatagtttgaagtcaggtagcatgatgcctccagctttgttcttttggcttaggattgacttggcgatgcaagctcttttttggttctgtatgaactttaaaatagttttttccaattctgtgaagaaagtcattggtagcttgatggggatggcattgaatctgtaaattaccttgggcagtatggccattttcatgatattgattcttcctatccatgagcatggaatgttcttccatttgtttgtgtcctcttttattttgttgagcagtgatttgtagttcttgaagaggtccttcacatcccttgtaagttggattcctaggtattttattctctttgaagcaattgtgaatgggagttcactcatgatttggctctctgtttgtctgttattggtgtataagaatgcttgtgatttttgcatattgattttgtatcctgagactttgctgaagttgcttattagcttgaggagattttgggctaagacgagcctactctaattctttaatctatgtagtagttgcttatatattaaacgtgtgaaaatcgtatgaaatcattgttaattcatactgaaatattcacttacctctgatctatttaagccaagctaataggtttcagcctgtttctgacctcaggagcctggacccacctatgctaagataaaagccatgatgactgtggcaacagtgttgctgacattgtactgaccacattgctgtaagtgtctccatggcacatctgcttctgtagattcagtcttactctgcttttagagactttcccatataacactaaaatgtacttgcctgttagtatgtttgatattcttcaaagggagagaattggcctggcatggtggctcacacctgtaatcccagcactttgggaggccgaggcaggcagatcacctgaggtaagaagtttgagaccagcctggacaacatagtgaaaccctgtctctagtaaaaattagccagtttggttgcaggtgcctgtaatcccagctactcgggaggctgaggcaggagaatctcgaacccgggaagttgaggttgccgtgagctgagatcacatcactggactccagcctggatgacagagtgagactccatctcaaaaaaaaaaaaaaaaaagaaaagggagataattaatttcatttcttcattctcactgacttcaatgaggagatttagaataggaaaagaaaattagtatacgaacaagttgagacgaaacagaactgacataagaagaacataaaaagcagagtccataaatcttgcagtatggtagcctaggtttcatcttaatagcactaatacagacacaaaataaaatgatagtttgatgaggtaagtacagtttttcaggcctgtcttacaggtggtaaatctgaagcacagattaagttacttgttcaaggtcacagtgctggaaaatggtaaagtcaggatttgagcacaggctttctggctctagggctgtgctcttaataattattccaaatgcatggcgtttgtgctttgtactcccttattagatgttacatacaatattcttttgtttatatatccctttgatgatcagaatctgaacttttctaaactgtaacagtttcttaggaaggtgataagttagacgacaaatctataattagagtttcttttacttttggagcatggattttgaaagtgaatgattaacgatgattgacattcttatcagatttttatttactttcttttaactatttggataataaagtaatgatgcttgcctgaataacagcagttctctgttgggctttgtgctttatacatggaaagagggccttggtctattgcaaggatactaaacagtgactgtatagcatgttaacaatgttttaataaatatttttagcaattatgagctaacttaagcctttttaaaatggaatatttattatttactttgtgcctagtaatgtgttagtgctaagactaaaagagcaaagcaaatgccattcctgccttcagagtgcttacagtctagcaggcaagattgatattaaacacatattcaaaaaaagggtatgagttttttaaagagaggtagtgctaaatcctctgggaacatcctctgatctcatctaaatttgaaaccctaggttctctgggaatctatagcaagaactaatccaagttaggggtcagagaagatgtgaagaatgagtaggatttagtcagctgaagagaatgaggctatggggaagcgtgttctaggaagaggagaaatatattcagcctcagagatgtgcaaaaaagaacttaaactgcagagactttcgggagaaaacaaacaaacaaaaaaaccgagcagacaaaaaaaatgcttaaagaaattaaataaatggatcgtagagtgcaaggtgaggagagctcaggagctcaggaggggcttaaaattaggctggagaagacgttaggaactaaattataaagaaccctgctatttatgataaggaattgggctttatgcaaagggcagtggaaaactgttcaaaagattttaagcagggcagtcattaattttgtggctctatcaaaaacattaggccaattatttaaacttgggcaattcatttgatcttcctagttctaaattttctcatttttagagtaggggacttggattagccctttcagatcaaagatccctaatgtgagtttatgcaccctgagaggatcatgtctagaaagaagtaacagagtatcctcatccatcctgctctctgttcttttccttttcctttcagatttcaatatcaattttctcatgaggcgtattttagtcagtattttggagaaggcattctaatgactcctatgtctatttttttgaaataaaattcattttgtcattataaaggtaatatagaaaattttttaagcatagaaaatgaagaagaaagcaatcataatcatggatgtcatgctactgaaacccttgggatataactagaatggaagtcaggctggtaaagcaaatcccatgagaggagagagtgattactgggagaggggaatgtttgggggggtagaataatcttcagattcctgaaggactatagtgcagaagttggaatagaagacagaattatggttaatgagtagaagctactagagatacagattttaactcaatttgggaaaaacaaaactagcaattgcaactgtccaccagaaaattagtgaattcctctgaatgcccataggtattctagtaaattactacatgtacttcaaggttgccagtagaaggtgttcaggttcttggcatctcgaacaaagaattagacaaaatgcacacacaacgtgaggaaaccaaagcacggatttactgaaaacaaaagtacactccacagtgtgggagcgggcctgatcataagagccccgcttacagaattttctggagtttcaatactgtagaggtttcccattggttacttggcgtatattctatgtaaatgaagagaatgaagtcacagagtcatttactcagactgcgccctattttaaatggagaggatgttgcttggtgtgtgtggtctatgtaaatggagaggatgaatgtgaagttacaaagtgtaaatgttgtggagaggatgaagtggagttgcaaagccattcacattcctgtcattactgaagtgctttcacttgatataattttaggacattagtgtggatcgggcttgtgttccctgcctccaggccctattctcctgcctcagcctcctgagtagctgggattacaggtgtgagccactacacccagctaatttttctatttttagtagagacagggtttcaccatgttggccaggctagtcttgtactccttgcctcaagtgatccacctgcattggcctcccaaagtgctggggttacaggtgtgagccactgtgcccaggctgaatttgaatgttgacctgtcttgctaggttgacgaagttctcctggatgatatcctgaaggatgttttccaacctggttattttctccccatctctttcaggtaccccagtcagtcataggtttgttctctttacataatcccatatttctcggaggttttgttcattcctttttattcttttttctctattcttgtttgcctgtcttatttccgaaagatagtcttcaagctctgaaattctttcccctctttggtctattctgctatttatacttgtgattgcattgtgaagttctcatgttgtgttttacagctccattagttagttatgttcctctctaacctggctattctggctatcagctcctgtattgttttatcatgattcttagctttgttgcattgggttatgtattaattcgttctcacactgctaataaagacatactcgagactagagaattgataaaggaaagaagtttaattgactcacagttcagaatggctggggaggcctcaggaaacttacaataatggcagaaggggaagcagacacgttcttcttcacatggtggtaggagagagaatgagtgcccggtaaagggagaagccccccttataaaaccatcagatctcatgagaactgtctgtcatgagaacaggatgagggaaactacccccatgattcagttatctccacctgagccctcccatgacacctggggattatgagaactacaattcaagatgagatttgggtggggacacagccaaaccatatcaggttacaacatgctcctttagcttagtgaagttcattaccacccaccttctgaagcctacttctgtcatttcagccatctcagcctcaacctagttctgtgttcttgctggagaagtgttaacggtcatttggaagagaacagactctctggcttttttgaggttttagcatttttgcattgatcgtttctcatctttgtgggcttatctacctttgatttttgaggttgctgacctttgagtgaggtttttgtggggtcttttttgttgatattgttgtagttttctgtttgtttttctttttaacaatcaggccactctatctatcgtaggactgctgtggtttgctgggggtccaatccagaccccagttgcctcagtttttcctgtacctggaggtatcaccagtgtaggctgagaaaaagcaaaggtggcagctagctccttccactggaagctccatcctagggggatactgaccttttgccagcccacacacacctgtaggaggtggctgaagacccacattgggaattgtcacccagtcaggaggaacgggatgagggacccacccaaagaagcagtctggctgctttttggtagagcaggtatgctgtgttggaggaggtcccttccttgtttggaccacctatattctccatagctggcagactagagcagctgacttgactgaaccatagaggtggtggctgcctctcccccccaggaactcagagttgtctctgatggactctaatccactgccattggctggctgggattccacgccagtcggtcttaacttgtgaggtgctgtggaagtggggcccacagaacgtcgctgcttgactccctggattcagctcccttcctagggatatatacagatggatttcccacctttctgggaatcctggggctggtgtatttaaaactcctgggtctctgcatgtacctaagtggctactctgccgtgactccacatagctctgtgtatcagacccaaggccctgttggcatggtctcatgaggggactctcctgataggtgagttgcaaagatctgtgggagaagtgtggtttcccaggtggggttgcacaatcactgtttcccttggctgggggtggagtttcttttggctctatgccactcctgggtgggctgtcactgccctgcctgccccacactacttttctttgttctctctgggtcaggtggtttgcctagtcagtcccagtgtaaccacctggatatttcggtgctgaattcactcttcctttttcattcgtctccatgagtgtaatggaccacagctgtttctaatcggccatcttggattgatctctgaagctaatctaaaaggtgaggaaactaaggttatgggaagttaaggaaactggctaagacatcaggactcagtgacaaagctgggatttatatttcaaattcagcagctgtaattttttttccattgtgtgcatcttctaaaataaataatcctgtatattagagatatagaggcaacagaccaattcttgtttcctggagagtttgggaaacttcctagaattccaagacacacaagtaccataagtgtaaatatccttccaaagccatttgccttcacctgggtgcctaaagcttcaatgcccagatatgccatagaaatacagatcattctgtagctggagttgtcccattacaactctgggtttatgaaatgtgcatctggtgaaatacatgagcctttgtcttcagattatgagtggaatgtgataatataaagagaaacttcttttaatacagataatgcatttttctttatcacagaccttccacaaattctgctgttctatttgggtatttgacaatggactttgtaatgtatgacagtgcatatgggaaaataaaatgttcatgtggggtatggggaaagagaattctcagcaaatgaattggaattataatataaagcagtatagcattaggatttgaatataaaatcatataaagccatataacactggatataggtggttaagaagtggataaaaaaatttcatggctgagtgcggtactaacgcctgtaatcccagcactttgggaggctgaggcgggtggatcacctgaggtcgggaatttgagaccagcctgaccaacatggagaaacatcatccctactaaaaatacaaaattagctggacatggtagcgcatgcttgtaatcccagctacttgggaggctgaggcaggagaatcgcttgaagccgtgaggtggaggttttggtgagctgagatcgcgccattgcactccagcctgggcaacaagagcgaaactctgtctcaaaagaaaaaaaaaaaaaaaaaattcctagggagatttctgattttaaaatggtgacatggaagcaagctgcctccactctcccctccccccacagaaaaccaaaaacaaatatatagcgccaagatttttgctagcaacaactctgagcagtcagtaggagaactgaacttccatatccaaggttctgctctctcccccattctgcctggcaataagcttgaggaaaatctttccccaacttagagtttctacactagaaaaactgagattgaggccaggtgtggtggctcatgcctataatccctgtactttggtggctaaggtgagaggatcacttgagcctgggggttcaaggttccagtgaactatggttgtaccactgcactccagcctgggtgactgaacaagactatgtctctaaaacaaaaagagagattgagaccatcaaccatcttttcgcaccatactgggttacctggcaggagacctgttcttgccttaacccacaggaagcatcatgactgcctaaagggaggaatattcccccaaggacaggcagacaaaggggagaaatgggactatcatccctagctctgaaaactctgctttgtaactaggccaaaggagatgccacataaaagtggctgttcagtagctctattctataggaggtacatttctttctttctttttttcttttctttttttttagggaggaggggtgtcttcctctgtcacccaggctggaatgcagtggcgtgaacacagctcactgcagcctcaactccctgggttcaagcagtcctcctacctcagcctcctgagtattgggactacaggtgggtgccaccatgcccagctaatttttaaaatttgtttgtagagacgggggtctcaccatgttgccaaggctggtctcaaactcctgggcacaaggtatcctcctacctcagcctctcaacttgctgggatgacaggcatgagaagagagtggtatatttcataggttccttggacaggaacctctagccagccttctcacactgctgggataatctctttgggaactccctagtttgggacaggcagcactccaatcatgcactagcgtcaaggtgaacctgggctttaaggtgccacaagagccaaaaaggaggaagtgacctagtagtaaagatttgctaaggaactatatctaataaaaaacaaaacaagccagacagaaaatactgaaataaataactaattcttcaatgcaaatactagaataaataactaatccttcagtgcaaaaaccatgacctttccaaagagacagagcaacaattcagtcactagccttaagtgatgatttgtaagatctgtgacctagcattcaaaatggcaattttaaggaaactcagtgatcaccatcataacaaagaagagcaattcagaaatttatcagagaagtttagcaaagattgaaataacaaaaaattaaatggaaattttagaactaaagaatacctttcctgaacagaagacttcattaaaggctctcaacagtagaatggactaaacagaggaaaaaaaaaatcagtgagttcaaagactgtctgaaaatacacagagaagtctgggtgtggtggctcatgcctgtaatcccagcactttaggaggccaaggtgggtggatcacttgaggtcaggagttcgagaccagcgtggccaacgtgatgaaacctcatctctactaaaaataccaaaattagctggacatggtgccgggtgcctgaaatcccagctactcaggaggctgaggcaggagaatcacttgaccccacaaggtggaggttgtagtgagctgagatcgcgccactgtactctagcctgggtaacagagtgagactctgtctaaaaaaagaaaaagaaaaagaaaaaagaaaatacatggaggagaataaagaaaaagaatgaaaaggaataaagatagcctacaatatatagaaaattgcctcaaaagaccaaatcttagaattactggtgttcaagagggagctaagcagaacaaggaaggggaagaaagcttattcatttcctttgagacaggatctcactctatcacccaggtcggagtgcagtggccccatctccactcactgcaacctctgcctcccaggtttgagccattcttccacctcagcctcctaagtagctaggactgtaggcatgtgccaactcgcctggctaatttttttattttttggtagagacggggtttcaccatgttagccaggctggtctcgaactcctgacttcaagtgatccacccaattcaacctcccaaagggctgggaatataggtgtgtccaccatgcctagcctagaaagcttattcaaaaaataataataggctgggtgcattggctcatgcctgtaatcccagcattttgggagaccaaggcaggcggatcacatgaggtcaggagttcgagactagcctgaccaacaaggtgaaaccccatctctactaaaaatacaaaaattagcggggtgtggtggcagatgcctataatcccagctactggggagggtgaggcaggaaaattgctggaatctgggaggcagaggttgcagtgagctgagatggcgccactgcactctagcctgggtgacagaatgagattccatctcaaaaaataaaaattaatataataataatagtaatagaaaactttccaggtacaagaaagcctgagatcactaaacagattcaacccaaataagatatcccaagggatatagtaaactctcaaagatcaaagataaggagaggatttgaaaagcagcaagagaaaagaagtaaataacatatgaaagatctccagtttggctggcaatagacttctgaatggaaaaccatataggccatgaggggatgaagtgacattttcaaagtgctcaaagaaaaaaaaaaacttgcattcaagaatactgtacccagaaaaactatccttcacatatgaaggagatataaaatctttaccagacaagtaaaaactgaatcattcaccaccaccgggcttatcttacaagaaataaagggagctttcccatttgaaagaagaaagcactaatgggttaaaaaaaaaaagttttcaagatataaaacccacttgtaaaattaagtatacggataaacccaaaatactctgttactgtcatgtaacaatagctacagcagcctgttaagagatagataatgaaaaatatataaaatcagacaactgaaagtcaaaagggggaggcagagtagaattttgtcatgtttttttattttgcctgtttctgttcttttatttgtgatccaagataagttgtctttttaatttttttttaagattgggtctcatctgtcacccagactggactgcagtggcatgattatggttcactgcagccttgaccttctgggctcaggttatcctcccacctcagcctcccaagtagctgggactgcaggtgtgtgccaccacacctggctcatttttttgtattttttgtagagacatggttttgccatgttgcccaggctggtcacaaactcctggactcaaatgatccacccacctcggcctcccaaagtgctgggattacagacatgagccacaacacctggcccctatgttgtcatcttttaaaaataatttgttatatctataagatgcttttttttctcatgataagcacagtgcaaaaaacctataatagattcactaaaaataaaagcaacaaatttactacctattaggtaggaagaaagaaaggagtctcaaaacaaccacaagacaggcaacaagtggcattagtaaatccttacttatcaataataacactgagtataaatggtctcagttctccaattaaaagccatacagtggctgaatgggtaaagaaacaagacccagctatatgctgccttcaagaaacccatttcacctatcaagacacacatagacttaatgtgaaggggttgggaaaatatattctatgcaactggaaatgagcaggaatagctacaattatatcagataaaatagtacactaatcaaagaatgtaaaaagagacaaggtcactatataatgataaaagggtcaattaagcaagagaatataacaattgtatatttttgcactcagcaccagagttcccaagtatgtaaagcagatgttaaatctaaaaggagaggtaaactgcaatacagtaatagtaggggattttaagccccactctcagtaacagatgatccagacagaaaattagcaaagaaacagtagagttaaactacacactaaatctaatagacctacctgacatttatagtacatttcacccaactgctgcagaatacacattctcttcatcagcacatggaatattccccagaatagaccatatcttagaccacaaaacaaatctgaacatattttttaaaaaagaaatcatatcaagtatcttttccaaccacaatggaataaaactagaaatctgtaacatcaaaaatacacaaacacattaaataagtaagttaaacaacatattctttttttttttttttttttttttgagagggagtctcactttgttgcccaggctggagtacaatggtgcgatcttggctcactgcaacctctgcctcctgggttcaagcaattctcctgcctcagcctcctgagtggctgggattacaggtgcccaccactacacccggctaatttttgtattttttgtagagatggggtttcaccatgttggtcaggctggtctcaaactcccgaacctcaggtgatctgcccacctcggcctccccaagtgctgggattacagacgtcagccactgcgcctggccacgagatattcttgaacaaccaatgggtcaatgaaagtactaaaaaggggccgggcacagtggctcacacctgtaatcccagcactttgggaggccgaggcgggcagatcacgaggtcaggagatcgagaccatcctggctaacatggtgaaaccccatctctactaaaaatacaaaaaaaaaccattaaccaggtatggtggtatgcgcctgtagtcccagctaattgggaggctgaggcaggagaatctcttaaacccaggaagcagaggttgcagtgagccaagatcgcgccactctactccaacctgggcaacagagtgagactctatctcaaaaaaaaaaaaaaaaagtactaaaaaggaaattttttaaaaggtttttttttgtttgtttttgagagaaggtcttactctgtcacccaggcttgagtgcagtgtcatgatctcagctcactgcaagctctacctcccaggctcaagtgatcctcccacttcagcctcccaagtagctgggactataggtatgtgccaccatacacctgactgatttttttaaatatttgtggagatgaagtatcactgtgttgctcaggatggtcttgaactgctgagctcaagctatcctctcactttggcttcccaaaatgctaggattataggcatgagccactgtgcccatcctaaaaattttttgaaacaaatggaaatggaataaaataaattaaaactatgagaacaatagaaaagatcaacaaagtgaaagtggtttttatggaaagttaaaatcgaaactttagctagactgagaaaaaaatagagaagacccaataaaatcagaaacaaaaaaggaaatataacaattgaaacctcagaaatacaaagcatcgttagagactgttatgaacaacctggaaaacctagaagtggaggaattcctgaacacatacaacctaccaagactgaaccataagaaatagaaaacttcaacaaaccaataacaagtagtgagatcagccgggtgtggtggctcatgcctgtaatcccagcactttgggaggctgaggtgggcagatcacgaggtcaggagatcgaaaccatcctagctaacacggtgaaaccccgtctgtactaaaaatacaaaatattagctgggcatggtggcgggtgtctgtagtcccagctacttgggaggctgaggcaggagaatggcgtaaacctgggatgcggagcttgcagtgagctgagatttcgcgactgcactccaacctgggtgacagagtgagagtctgtctcaaaaaaaaacacaaacaaacaagtaatgagatcaaagctgtagtttaaagtctcccatcaaagagatggagatgcaaggagggctcagtatatgcaaataaataagtgtggtacatcacatggacagaaccaataacaagaaccatttgattatttcaatagatgccaaaaaagcatttggtaaaattcagcatccctttatgataaagcccctcatcaaaatggaagtagaagaaatgattatgtaccttaataataatggaattattatacctcaataataaagaccataaatgacaaacccacaggtaacattgtactgactgggaaaagttgaagcctttcctcctaggaccagaacaagacaaggatgcccacttataccactttttttcaacgtaacagtggaagtcctggccacagcaattaggcaaaggaaagaaataaaggacatccaaattggaaaggaagaagtcaaattagccttgtttgtagatgacatgatcttactcatagaaaaacctaaagacaccaccacaaaactgatagaactgataaacaaattcagtaaacttgcagcatacaaaatcaacatacaaaaatcataattgtaagtcagagacgatctgtgcaagtatctgtttgagtccctgttttcagttattttgggtatatacctaggagtggaattgcttgcttaaatcataattctatatttaactattaaggaaccaccatactgttttcacagcagctcaaccattttacattatcaccagcaatgcagaaggttctaatttctccactcttcactaacatatgttattttccattttttgattctagccatcctagtttgtgtaaagtggcatctcattgtgattctgattgcatttccttaatgactaattatgttgagtatcttttctcgtgcttattagccatttgtatatcttctttggagaaatatctattcagattttttacctatttttaaatttttttatttttattgtcaagtaaacttttttatatattatggacagcaaatccttatcagctatatgacacagatattttcttccgttttgcaggttgtcttttcactttcaagaaagtgtttttgttaaaaaagttttaaacttgcttgaagtctcactatttttgctttttttaaagaaagcaaacctttatgtaataatgagtgcaaacggctttgttgacacttacagaaataatagctaaatttaatgcaaatttgtgtgaattgaataactttgttacattttctaagctttatctttctatgaaatagggtcccattcacctataaaggatattttgggatttttcactaaaacttataaaatctgagaatgtgcttaggagactggagataaattttgtgagcctattatctagttagtaatgacaccatcttattaaatttcaaggtgttaaatatagcccattcaaatactcgtatatgtaatctaattattattgttatagaagttaaagctcccttgctgaacctatgattcttctaagctgctgaacatagagacacatgactgagcagtaggaggtgcttattgcttccagagttgcactatgcttgccttgatggcgtagaatggccataaagatgactgtggaaacagtgatttctaaactcttctcagagttttggatatgctccatatccaaatgaaacagatgactgtgttctgttctgtagattttactacttttctctgccagtagcctctcacatttgtcacgcaataggaaccaagcaagagaatctggacagatcagctcacatctattgccctgttaaagtaactcaaagatatgcccaaagaattggatacttgtttcatcattggataagctggaactgtctataagtggctaggatgtatcatgccttatcacaagaaatagcagaaaaaaaatatatagtctttgatttcattaaattcctttgtttgtttgtttgtttgtttatttttggacacagggtctctctctgtcacccaggctggagtgcagtggtggtgctaacatatctcactgcagccttgaactcttggctgaagcaatcctcctgcctcagccttctgagtagctgggactaccagtgcatgccaccatgcccagctaactttttcatttttttgtagaaatggggcctcactttgttgctcaggctgttcttgaactcctggcctcatgtgatcctctcaccttggcctcctaaagtgctgggattgcaggccagatgagccactgcacccagccaatttcacaaagtttcagtattctcagaaaagaacatactcatatctagaaatgtcttatgacttaaaaagcaaagtataaccatgtgcatattaatagggcacaaagtgaatctggtagagtgccagctgtgtctaatctgataagtttatttcatatggaaaatgtgtgtcaatcttagatgaggctaatttgttgaaaataactgaattctggtctcttttagattgtcagaaagggattcatttaacagtaaaatttaatccagatatatgtagtcatatgtttttaaactttttaaaccctgaaaattattgaaatatgtgccattttaatagtatcagcttctgattgcttttattccatcatcatgtgatatactcctcattaagcagcaccagtaaccagagtttaattattgtgtagcactgtgtgaaagcttttgtctctttatcatatatggcacagacagtactcttggttgtaagtagggatatccagcatagtttactgtctacatgcttatttctttagctttttttttttttgagatgaagtctcactctgtcgcccaggttagagtgcaatggcacaatctcagctcactgcagcctccgcctccaaggttcaagcaattcttccacctctgcctcccgagtagctgggattacaagtgtatgccaccacgcctggctaatttttgtatttttagtagagacagggtttcaccacattggccagactggtctcgaactcctgacctcaagtgatctgcccaccttggcctcccaaagtgctaggattacaggtgtgagccactgcgcccgacctctacatgcttatttctaagagctatataataaaacaatataactatacagattttgatggtttcctccagagcctttgccttgcttatcattgctgtgtgagaagggtagcagcactaaaccttgtgtttctagagatagaagtttgtccctgtgtactgtcgattaggacaggcagtttttcttgtcttgcctgaagaaaaacgtaacttttttgagatacaatctttctgataaggtaaatatgtttagcaaagccttattttgtggaaattttccaaggcttgaccctgtaacttctatagtagagaaaagggcagtgctttcaaacttttagctcttctcctggttggttgcctgccatggtcgtattttaaattgagtagcaagtaaataaatacttagcttctctctataaatgagctgtctgcaaagggtttctttgtactatatgactgttgtaaagtttcaatggagtaattataggaaaagaaaaagaacagatttttacttagtgctgtgttaatgccagtgtttgtatgcaataaaaatgactggccactcattgtttcagaaaatagatcttaacactcaaaagaaacaaattctaaaactttaataactttgaggaacactctttaaatacctagactttagatacatactattgtccaggatagatttcccagcatatttatctacaacagatcttaaatattgaaaactaacagaagttgttgcataaatttttctgcaattagataagaacatttttatggctggtctgcaaacagtccgtaaagatagttgctgcctatcatacttagagttaagggatgaactccattctttattttctaaactgtgattgcattatcctaaaatccagtggtttttctcacatacagtctaggattgagaggtccaaggccagtagggtgcctctgcctcctctcaagctgcttccattgatgggttcagggatttgttagagcttttaccatctccctgccaacaggggaaaggaagagagaatacatcccttccgttttaggggcacaagtatcaaatgacatatatcacttttatttaccaaccagacctaatcatatggccataccaagctgcagggatggctgggaatgatcatctttagatagataaccacaagcccaattgacaggaaggattattactaaaggaagaagcagagtggatactgaagtacaactttagtagtctctgccacagtaatacctctaaatgcatacatatgagtctgtaggaacagtcctacaaaggactggtgaagctttatattaatatatagtggtttccctttctttactgtctgcagaaagattctggctagattttttttttaaactttttcaacagccttataaaggtataagttatatagtataaaattcacctgtttgtgcaatttagcagagagttcacagagttatgcatccatcatcacatccagtttcagagtattttgaacacctccctaaaattccttcatgctcatttgcagtcagccctcatcctaccccccagatccattcacccctaatctgcttttatataaatggaatgtatgtataaatggaaccatacagtatttagtcttttgtacttggcttcttttacttggcataatgattttgaggttaatctctgctatagtaaataacagttatttcttcttttttgttgcataatagtagcttgttccttttcgttgcatagtgcattgtatggatagcccacattttgtttatccatttaccagttgatggactttttgcttgtttctagtttttggctactatgaataatgctcctatgaatgttccccacaagtttttctgtgaacatgtgttttcatttctcttgggttgatgcctaggagtgaaattgctgagtatagtaagtttatgtttaacttttaagaaattgccatactattttccaaagtggctataacattttatattcccaccagttatgtataaggattccagtttctccatatcctcaacaacacttgatgtcaatcatttttgtagtagtatctcatttgaggtttttatttatattttctaatggtgttgagccccttttcatgccctttatatattttctttggtaaaatgtctgttcagagtttttgcccttttttcttttgttttttagacagtcttgctctgtcaccaggctggaatgcagtggcgtgatctcagctcactgcaacctctgcctcgcaggttcaagcgattctcctgcctcagcctcccgagtagctaggactgcaggcacacgccaccacgtccagctaatttttgtatttttagtagagatggggtttcaccatgttggccaggatcatctcaatctctcgacctcatgatccgcccacctcggcctcccaaagtgctgggattataggcgtgagccaccactcccagcctttgcccatttttaaattgggttatttgtcttcctattgagtcatgagagttctttatatattatagaaataagtcctttatgacatatatgatttataaatattttttcccaatctgtggctttttaaaaattaatggtgtgttttgaaaagcaaaggttttaataacttagccatttttttcttttatggattatgcttttggtgtcatctaataaatcttggcctaatccaagactgcaaagactttctcttatgttttcttctaaatgttttatagttttcactgttatatttaagtctataataaatttttctttagttttttttttttttttggtatggtatgaggtaagggtctatgtacattttttttttgtatagggctatccaattatcccagcactatttgttgaaaagattattctttcccctattgaatttccctggcaactttgttgaaagtcagatgaccataagggtttatgtctgaactctcaattctgttctgttaatctatatgtctctctttacctggctagatttttaagactttcacagtaatgtttctgaattcaccttcttgcttttacatgcaatcttgtcaatgatgggacctgaaatgacctcacaacacttaaatatcgctgaaaagagtgatccagaagctgaacaaagttttatattcataagccagataaataaatacaagataagaagcatgtcaacccagaggggaaaagggccaaaagggaaaatatgatagtcacaaatatgaagtttttttgtattaaaatacaggttaacgaagagatctaaccagatagttgcttaaacaagaaagatcttcatttttgtcttttagtgtcagtttcagtatacacaatccaaatttgatgtggtggctgcgttgaagtcaggaaatcagactcgctctactatctcaaaggagagcatatctcgtcctttgaaggaagtttcacacattaattttattcattccattggtgaaaacttgtcactggccatacctagatgcaaacagcacttggaagcataatctttagctgaaggccgtgtgcccaactaagacttacattactaaataacaagcaggtgtcttagtcaactcggactgccataaccaaacaccgtatacaatatcacttaaacaatgaatatttatgtctgcagttttggaggctgggaaatacaagatcagtgttccagtagatttggttcctggtgagaactcttttcctggcttgcagatagccacctttttgttgtattctcacatggcagagagggagagttttggtttctcttcctcttcttgtaaggacactaataatcatgggggctccaccctcatgactttatcaaaacctagttacctctcaaaggctgcacctccaaatgccatcacattggctgttagggcttcagtatctcagtgtgggagtgggttggggaggacataaacattcggttcatatcagggaaaatgcacacttagaggaaattggcaggttatgcttccaattacatcagtattacagatttataaatatgtgttgatattatgtatacatcagaatatataatgtatgtatgtgttgatattatgtatacatcagaagacaaacattgaggacttacattggagacactgttatggcgattgcaaagactgcctttagtgagatttccagaatttaacagctggtggaaggggaggcagttatagtgttataactttataaatgttatttctaaactgaaaatgccattttaattttccaaacacaatcactgcagatctaagctgcactatttacagtttttgtagctaccttgatatagtaattcttcacttcaaaaaatatgtattgaggctgggcgtggtggctcacgcctgtaaccccagcactttgggaggctgaggtgggttgatcacctgaggtcaggagttcaagaccagcctggccaacatgacaaaaccccatctctactaaaaatacaaaaagtagccaggcatgctggcgattacccgtgatcccagctatgcaggaggctgaggcaggagaattgctggaacctgggaggcagagttgcagtgtgctgagatcgtgccactagcactccagcctgggtgacagagtgagactctgtcttaaaaaaaaaaaaaaaaaagcccaaaaaacatgtatacgtgtattgagtgcctgtcatgtgtcagggatacaggggtaagttgtctgtaaccagaaatacaattatgtttggcctcaaacagaaagcagagtcttctcatcctgaaatattgcagttttaataataatataagaggcctttataatttagaactattatgaagtaattatgttttggaaaaatcccaggactggatgcaaagagacttaagtgtatgtcccagttctgtcactcatcgggcaactgtgggctgacctgtttcctcaggtttaaattgaaggagtttattatatattttagtttctacagtctcctttgtttctatgattctgtagctctaattatctataatgtatatatttatgtgaaatatactttattatctataatctgtacatttctatgattccatagctccagttatctttaatctgtagtcctagagtatttattgcaaaccacctcaaaacagtgtcataaaacaatggcagttatgctcacagaatctgcggagcaagaattcacacagggccaggcatggtggctcacgcctgcaatcccagcattttgggtggccaaagtaggagaattgcttgagctcaggagttagagatcagcctgggcaacatagtgaaacctcgtctctagaaaaaaagtttaaaaattagccaggcatactgctgtgcacctgtagtcccagctacctgggaggctgaggttgcttgagcccaggaggtcatggctatagtgagccaaaattgtgccactgcgcttcatcctgggagacagagcaagatcttttttcaaaaaagaagaaaagaattcagagcctgggcaacaaagtgagacccacccccccgatctctacacaaaattcaaaattaaaatttaaaaatttgtctcgtacagtggcatgtgcttgtagtctcggctattcaggaggcttgaggtgggagaattgcttaagcctaggagttagaggctgcagtgagctctgatcgtgccactgcatctgcctaagcgacagagcaagaccttgtcttttttctttttttttttttttttgagacagagtcttgctctttcacccaggctggggtgcaatggcacgatctcggctcactgcaacctccgcctcccaggttcaagtgattctcccgcctcagccttccgagtagctgggattacagacatgcgccgccatgtccagctaattttgtatttttagtagagacggggtttctccatgttggtcaggctggtctcgaactcccgacctcaggcgatccgcccgccttgacctcccaaagtgctgggattacaggcgtgagccactgcgcctggccaatccgtggttctttactcttgtgtcagccacctgaagtgggatgtttcaaagacagggctcagctgggaccattaactgaaacacctacttcggcttctccgtatgtcttgagcttcttcacagcatagtgccctgaatgtcttacatggcagctcagggttctcagaactggtgttctccaagggaaagtttttgtcttataaaataattaaaaatattttagtgtaataaaaaaattaagaattatttttaagccaggcatggtggctcactcctgtaatctcagtactttgggaggccaaggtgggaggattgcttgaatccaggaattcaagaccagcctgagaaacaaagcaacacagtgtttctacaaaaaaaaattaaaaaattatctgggcacagtggttatgcctgtagtcccagctacttgggaggttgaggcaggaggatcacttgagcccaggagtttcaggctgcagtgagctatgatcatgccactgcactccagcctggacaacatagaccttgtctcaaaacaaaacaaaaaaagaattattcaaaccaaattgatgaaaagtgttaagtattaggtaagtagagttataaaagtttatttggggtcaccaggaacttaaaactggcatttattgggtgtatactatatgcttggcattggaccataagcacttttgtggattataatgtgatttattcttcacaacagccttatgcagaaaccaaggcttagagaagttaagcatcttgtccaggtcataatgctaagtggctgaactgtgactcaaaacagatctaactccaatgttagtggcctaactactgtattagtccattttcacatgctaataaagacatacctgagactgggcagtttgcaaaggcaagaggtttaatggagaagtcacagttctacctggctggggaagcctcacaatcgtggcagaaggcaaggaggagcaagtcatgtcttacatggatggcagcaggcaaagagagagctggtgcagggaaactcccatttttaaaaccattagaacttgtaagactcattcactatcaggagaacagtgcaggaaagattcacctccataattcagtcacctctgaccaggttcctctcacaacacatgggaattacaattcaagtgggagttacaactgaagatgagacttggatggggatgcagccaaaccatatcaactactgttacgagttgaattgtctttaccgcatccctaattcatatgttgaatatgactatatttggagtatagtcagcatctcagaatatgactatatttagaggtagggtctttaaagtggtaattaaggtaaaaggaggtcattggggaaggttctaatccaatatgattagtgtccttgtaagaagaggaaatttggacacagacacacacaaaggaaagatcatgtgaggatacagggagaagatggccatctacaagccacgaattgagccctcagaagatacaaccattgccaacaacctttatcttggatttctagcctccaaaactgttaggaaagaaatttctattggttaagcccttcagtctgtggtactttgtttttttgttgttgtttgagacggagtcttgctctgtcgcccaggctggagtacagtggagcgatcttggctcactgcagcctccgcctcccgggttcaagcaattctcctgcctcagcttcctaagtggctgggattacaggcacatgccaccatgcccagctaatttttgtatttttttagtagaaacggggttttaccatgttggccaggctggtctcaaactcctgaccttgtgatccacctgccgcggcctcccagtgtgctgggattacaggcatgagccactgcgcccggcccagtctgtggtactttgttatggcagccctagcgaactaataacgtcactaatagcacattactaatgtgcatacctgggttttgttttgtttttttaaacctgttttaatcagcctactttagtgctgtccttcccattgccctctctcttacaaagatattgtggacagatacatttgttttttatagacctacaaactttcttaccattatcacatgctgagacatataataaaggtgtacaattcttcaaggtaaaaatacctccacatgggcatactctttcctataggataaaattagagttcttccctcttttgagatgtgagcatcaattaatagcccctaaggagtttattttctgcaaagatcaagattaattacaattgtttcaaagtaatccggaaatcaatgtggaaatctctggttttataaagctagttatcagctgctaacgaactgtctaaatatgccaaaaattgaactttatcatgtagcatttaccttctgaaccatgtatttatttattatggtctgtcatgtttgaattttttgtcttgtgttatatatataaatcttgcctccctaataatgagcttcctaaagatgcacatttttgaatcctctttagttagtaaaatgtaatgaatgcatttgtaggtgagcactaaatgctattaaactgaattgtaattttcagatttaggtattttgtgtacagtttccctctaaactccacttttgaaacactattgaaatcaatatgggggatgctgttttgatacattcactctgcccttcaatttttttaagtataatttccattttatttttctccagaagatagcttttcttcagtccttaaaaactcagcttcttacacaggcttggtagtggttgtagggcagcacccggaggcctaaaaatgggtgtttagtcattcccagcttcataagaacaattcctgtctaccttgctatgggtggcaccactcacacagtaacgcagttttacatacatcttgggaagcgcatagacatcaaagacactccagaaataatccctgacagctgtagcctctactatgtttcaaatgatgaacttcttaaaatggccttgtccttgggcacgcatcaggcgcagtttatgcagcaaatagacagcatgtggctgcagctctttttggcatgaccattgttccttctttatttgtcatcttggaagcaaggactgaagagctgcctttcaatttttaaaaccacagtcttctttcctgacatgttccttagacagtggctctctctcgcagcactgttttctcaccctggggcttaagaacataacctatcaatgtattggaagagaaatgtttctgaataaggaccaggcctttgatcattttgtgagatattcatggtctcctctatctgaaagagcaatgataacattatttccaaaactggaactcatgcatattcacatctcaagtatactaaaacttttcattttctggtgaagaaattcaatgtagtggttaaaagtgtgggctctgtcttagttcaaatcccttctgtgccaactaccagctgtgtgattttaggcaaatcaacttaatcttgttgaaccttgatttcctgttctataaaatgtagccaattatagaggataggccaggcacagtggctcatgcctagaatcccagcactttgggaggcccaggtagaaggatcacttgagcccaggaatttgagaccagcccgggcaacagagggagaccttgtctctacagaaatatcaaacagccaagtatggtggcacatgcctgtggtcccagctacttggggggtcaaggagattgaggctgcagaactacggacacatcactgtactccagattgtgtgacagaacaagaccctatctcagaaaaaaaaaaaaaagtagagcatatctatagagttgtagaaataaataaggtaaggtgtgttatatgcttataatagcacatgggacataggaaatcttcagtaaatgttagtcattattatcattaccattatttattggctatccagatattggagaaaactgaaatcgaccttaagactgatttgtgtaaagcacagtaagtattcagtgaatgtttattgggtaataaagacatgtcaagtgtatatggaggctttattgaatagattaccatttttcaaaaacaatgaaaggttttaaacagtttatttcagcacctcctcaatgaactggagctcaaagccttaccctagtgccctgtctggatgagtgacacatagccaaattatataataatgttaattatttgaggatattgtatataaacaaacatttagaagtcagtttgctgaccaagtacggaggcttatgcctgtaatcccagcactttgggagcccaggcgggtggatcacttgaggtcaggagtttgagacagcctggccaacatgttgaaaccccatctctactaaaaatacaaaaattagctgagtgtggtggcacgtgcctgtaatcccagctacttgggaggctgaggcaggagaatcgcgtcaacctgggaggtggaggttgcagtgagctgagattgtgccactgcattccagcctgggcgactgagcgagactgtctcaaaaaaaaaaaaaaaaagaaaaaagaaaaagtcggtttgtttaattgtagcttttgtcacctctaagatttaatcaggaaagtatttagtcaaaacttacactgctgagtagtttcattaggagatgcaaatatgactaagctattacacctggttcagggcttgtaagcattcactttcaaactactggacagtctagaaagcttcataagaaagatacaaagtactgactgggcacagtggctcacacctgtaatcccagcactttgggagggcaaggtgtgtggatcacgaggtcgagagattgagactatcctggccaacatggtgaaaccacatctttactaaaaatacaaaaatcagccgggcatgatagtgtatgcctgtagtcccagctacttgggaggctgaggcaggagaatctcttgaacccgggaggcagaggttgaagtgagccgagattgcgccactgcactccaatgtggtgacagagcaagactctgtctcaaaaaaaaaaaaaaaaaaaaagagagagatacaaagtactactgaaatctagaaaaggggaaagagcatctcttactgcagaatcagaagggaggacttcatgaaataaatggcatttatggagaactctaaaggatgactttgcttcctacttcgcagagcatttagggtaattggattctgctcagatgtattacttttccccaggcccagaaaagattttgtccccctgctattcaacattaatctattcaaccttgctttagatctggtccttcccatcttcctcagagccttgcatggaaggataatctcaacgggcacgatggtggcaacttatgatgaccttccttaagcctggaacatgttaactctcgaattaagaaaaatcagtcactattacagaccccgagaattccctacttagtagagcttaagtttaagtagagacaggcaataaacacaatacctaagtaaaaatccatagtactgtatattagaagataactaatgtggaaaaaataggacaaggtcaggaagatcagtagtgctggaagagtgcagtgttaaatagggtagtaagggtagatttcactgaaaaggtacatttgcgcaaggacttgactgaagcaagggagtgatccatccacatggctagatagagggaagaattttcaaaagagaaaagacagcgggtgggccgggcctggtggctcatgcctgtaatcccagcactttgggaggctgaggcgggcgtatcacaaggtcagtagattgagaccatcctggctaacacggtgaaaccccgtctctactaaaaatacaaaaaattagccgggcgtggtggcgggcgcctggaggttgaggcaggagaatggcgtgaacccaggaggcggagcttgcagtgagccgagatcacgccactgcactccagcctgggagacagagcgagactcgagactccgtctcaaaaaaaaaaaaaaaaaaaaaaaaacagcaaaaaacaacaacaaaaaaaacagctggtgaaaaaaccttggcaggagcatgtctggtgtaccggaggaaccacaaggaggctagagcatgatgagataagaggagagtggaggagaccagacgtagaatagccggggagaaagcgagccaggtaggggagggctttgtaggccatggcaaggcatttggtctgtaattcttttatgatttgtgcttttggtcttgatttcttccttatgaatcatagatgatgaggacttagaggaggaaaagaagaattgttaattatcctctttttaaaaacggaatttatagattttcataaagatgaaaatgttctatatgtaaatttttttgaatatttgtttttcttttttcagtttttagttttttgtgcaattaaaaaaatataatgtgagatagagaacctgatttttctcattttgttattttggttttttgggtttgttgttggttttttttttgtttttgttttttttttgtgtttttttttttttttttgataccaggctgcagtggtgtgatcttggctgactgcaacctctcctcccaggttcaagtgattctcatgcctcagcctcccaagtagctgggtctacaggtgtgcgccaccataccctgcctatttttctcattttgatcgccagttgtctgaccaacatttattaaataacttatcttttccccacctatttgtaataatactgccttaattttgtgtctgggctctttaatactgatttgttgatctgttcctgagctagtatgtcacagtttcaattagtaaaacttattataaatctttgatgtctagtagagcaaatgccttttcctttattattgtttcactattcttggtccttttctcttcagtaagaattttttgatcactttgtcaaggctcatattttaaaaatcctttgagatattgaatagaagtgtgttacatttatgaattgattatggaagaattgatatcttcatatagttcagtctccccatccgttttatttaaaccctcttttatgttaacaaaagtttttagaaaattctgcatagaggttttatcattagatttatttccaaagaccttaagtttttgtagtaagaatgaatgggctctgtttttattacattttaaattggttgttgctagtgtatagacatactattaactttgtaaattaatctcgtatgtaacaaacttgttaatgtctttctaagtggttttattgttttatcaatatgttgttttagatttttctaattaaatgactacaatcgtctgtaaaaaatgaagatttttgccttttctaatttttaactttatatttattacatcatcttacggcatcaacagtaacttctctgttaaaagggccatgacagctggacatggtggctcacacctgtaatcccagcactttgggaggcctaggcaggtggatcacaaggtcaggagtttgagaccagcctggccaatatggtgaaaccctgtctctactaaaaatacaaaaattagccaggcgtggtggcacacacctgtaattccagttactccagaggctgaggcagaagaattgcttgaacccaggaggcagaggttgcagtgagctgagattgcaccactgcactccagcctgggtgacagaataagactccgtctcaaaaaaaaaaaaaagtgggggggccatgacaataagcatccttatgttgttcctgattttaaagggaacatttttaagatttcactgttaaagattttgtgtgctttaggttcagattgatcatttatgttgggttaatagttaatagtctattctattctgttcaaattctaatttgccaagatttttaattattaaaactgcaattacttttgcaccaacctagtattaataggtatttaattttattaagtgttgtttgtatatctgttgatgaatttgtgatttttatcctgtaatatgtgaattatagtaatatttcttcttctttttttaaattagagatagggtctcgctgcattgcccaggctggtctcgaactcctgagctcatgcagtcctcctgccttggtctcccaaagtgctgtgattacaggaatgagacaacacaccaagccatatttcctctctttttaaagacgttttagagacatggttttgctatgttgatcagactggagtgcaatggctagtcacaggtgtgatcatagtgcactatagcactgaaatcctaggttcaagcgattttcctgccttggcatcccgagtagctaggactataggtgcacaccaccacagctggatgatgtttcttcttttaaaataatattttaaatagtaaaaatgaagctgttaaaaaatctgaaatgtaaatttgaacccctctaaagctactctttcatttcacttccctgtttcaaagaacagtaccattcagcctaaaatcttaggagctaatctaggcattgctcacagctgcttggtgaccagatcctgtcattttcaatattgtcgttgcctctctattctttctttgttgcctaattattctccatgtacctgcaagagcagaaaattcctttgattaaaatctttcagtgattccctaatctgtagccttcacaaatttgaactccttactgtgccctataaggcccttcaagatctggcccttccttctccagccttgcaggcccttcttgttgcactctacttcccactgattcgccagcaaatcagtcattccttggggcctttatttagcattcctctctttgtctagctgtctagcagttactcatttttccaggcccagccaagccttatctacctccataatatatgtcctaacttccagatagagtagaccgttgaatctttgtacatcctcctatgccatacaaaccttaatcttttgaaattgtgtatggtctttattcatttatgtatttatttcatctactagacttgtatctagtatcttgaagtttgtgactattttattcaccattgtattcctaacacagtgaaggtattcagttcacgtataatgatgaataaacaaaagaacaagcagacaggcaatgattgagataaaagagaaagggattattccaaaaggaaaataatgaaagcaaaagccttgttaactgttaatttcattatctacattgagtcctgggtggagccttagggaactcgggaaatgattctaatgattgtctactgattgagggaaaagattccctgacctgcaatcttttgcaaatttgttgcctttttttctctctttatgaagaagctttttctattttcctctctttggggattttctttcttttgaattcatttagtcagttaatatttattgattacttgctatataccaggctcagtgctagtgctgggaactagttagatagagcctgtctctaccctggagtatctctctggctggctggggtacaaacatgtaaacaaacaaatatagcagtgattttcaaatatctttcctaattgtcttgtcatgtttttccaccatgaaacccaccttgtaaagaagattggctgttatgttctcactcataggtgggaattgaacaatgataacacttggacacaggaaggggaacatcacacactggggcctgtcgtggggtggggctggggggagggatagcattaggagatatacctaatgtaaatgacgagttaatgggtgcagcacaccaacatggcaaatgtatacatatgtaacaaacctgaacactgtgcacatgtaccctagaacttaaaatacaataataataaaaaagaagattggctgtttattggggttttaacagttgtatttggcaaacaaaagaataactggaagtaactgagaataggatgctggaaggaaattgtctgagatgccactctcctggtttatttactactgtcttcctcactttcaactgtcagcattgaaggattgtattcctcagttaggtaaaaaatatgaccaatttatctgctttaattagttagaaattagaaatttaggggccagacacagtggctcatgcctgtaatcccagcactttgggaggccaagctgggaggatcacttgaggccagagtttgagaccagcctgggcaacataacgagatcctatctccagaagcaaattttaaaaatcagccaggtgtagtggcatgcgcctgtagtcccaactacgaggcagctgaggcaggattatggcttgagcccaagaggtcgaggctacagtgagctatgatcatatcactgcgctatattccagcctgggtgacagagggagacactgtctctacaaaaaataaataaataaataaataaataaataaataaataaataaataagaaatttaggaagtatattcatctctactgattttaaagcaaaatttaattttttttttttttttttttgagatagggtcttgctctgtctcccaggctggagtgcagtgatgcaatctcagctcactgcagcctcagcctcctgggctcaagtgatcctcccacctcagcctcctgagtacctgggactacagacaagtgccaccatgccagattttttttttttttttgtaaagacagagttttgccatgttgctctggctggtctcaaactcctgggctcatgcaatccactcaccttgtgctcccaaagtgttgggattacaggtgtgaactaccatggctggctgctaaaagtaatttctttaactcctttaaaaatttttattttatgtatttacttatgagatggggactcagtttgttgaccagactggccttgaactcctggcctctagcaatcctcctgcctcagcctctcaagtagctgggattacaagtgtatataccaccacacctagatcaaacttcttttttttttttttgagacaggatcttgctgtgttacccaggctggagtacagtgtcagatggcaggatcttggcttcctgggctcaagcagtcctcctacctcagtctctctggtagctgtgcctgcagtcacatgccaccatgcctggctaattttttattttttgtagagatagggtttcactgtgttctccaggctggtattaaactcctggactccagcaatcctcccaccttggccttccaaagtgctgggattataggcatgagccactgcgcccagcatacgaacccatttttaagttgtcaaacatacacaaaagtagagagaagagcaccgtgaacatccacgtagtcatcacccagcttcagtaaccttcagcctcatgcttttcttgttttatatctcccccatctttttttgcaagagtattaggtaaaaatttcagacatatcattttactcataaatatttaagtatatatcttaacacataaggactttaaaatcataaccataatattgatatcagacccactgaaattaatattctaatagtgggtgcatttttaaaattcaaatgaatatgaaacaaccagagtccaagtaaaggaacttataccatgttctaatttaccaagtaggggatagtttggcttttaaccccaaatgtagtgggatttttttttgttattttagccagaaacatttaaaaatcatcccatcattgtcccctcttttaaaacagagtaacaaagtaagcagagtgaatgctcttaatttataattttattttcagggtattttacaatatactgtgggtgatgggaatgaatatgtgtccagcaaaacttgatattttcttatatgatgaatatttcccattttatttaaaaggcaaagctgatgggatattctttgcattatattctgaaaataaaaatcagaatccctgctgctaatggtgagactgatattctaataccctagttctaagcctagctttgaatgctttgaataagggaagtcattccttatgacttccaatagataatgctttgtttcactgatcctctttcagggattttctttgtgaggcttttcaagctaaatagaagccagtacttctgagccaaattaaaccttgcttcagccctggaaagacttgcatgtttttttaaaaagagactagggaagaaacagttattgtcatatgttttactaggctatattagtcatctcagccacgtagttctattttgctctttgcctaaaggtattaaaaattttaattaatttgtaagctgtagccatctcaagttcagttataaaataaactgatggtactttagatgtgcatttaccacttgccatcggtcttctgtgcactaaagaaagcaaaagatgacttatattttataccagaggtctttgttaatatttcacctaaaaaaattaaatatattgccttttattacttcctgtttgaacctacaatcaagtggagaaataccatgtgaaagattgtacatgttggcttctctggtagaagacattgtttgccttccattttgtacctaggggtagatttttgaggcttgcctgcttaccattaaaataagatttaaattataaaatttctttagactgcttttttggttttttttttttttttttttttttgcctgtccagtgaagttttgagctatacttgctcaaaacactgactataccttgagctctgaatgatagataagcagttagatagtaaacagagtagaattggtaaattagaaaggacccagaggaatcatctggtacttttccttcatataggatgaaggaaaccgctccaggaagtgatccttttctctaaggttttcaaagagggatgtttattcatttatttaatacttctttgtttttttttttttaaaagaagaatgctgagcctgatgctgtgtttaactctctccttagtcaccctcagcctggaatagtttctcagtctttgacttttataatgttgatacttttgaagatgacaagctagttatttagtagaatgtttctccatttgagtttgtctggtggttccttaagattagatttaggatatgtatcatgagcaagaatattatagaagtgatgctgtttttctcatcccattcattctatcagatggagtatgattttaatttgtctcattggctggtgatgcttactctgatcatttgaccaaggtgatttctgcaaggttctttatgtaaagttgctctattccccttcctgacaaataagaattttgtggcgaagtactttgaaattatataaatatccaattcctaataaaactttcaatttatttcatttatatatagaatcatgatttcctgtttattcagtattatatcttattctaccattatttattttaatgctgaaattatcccctacttggccactgggagctccttcaggatggcttttgtgtccttttgacatgtttccattattcttcaagcgtaacttgcttttggaaaagcaagatattccaggctctttttgtactttgctggcactagccctagaatcaggtatttctccaagtagccctggttctttttggtagacactgatatatagcaaccaagatctgtgcagtagatttgctcattgtttctggatatgtattgttgcttctatatcttctcagcagacagaactagggactaaacacacacacacttacatacatacatgcatacatacatacatacatacatttatacatacatacatacatacatacaaacatacatacatttatatgcatttgcacctgtatttcttcaaccccacagagctcattctagtttttcatctttctggatcctgaacttcctgataaatcccccagtatttgccaagtagccacctctttaattgtgtggttaccctcttcaccctgttaaaatgctgcatgccagattgcacccttccatggatgcctttctgacattctgcttgggctccaacacatctgtgtcaggctgccactcttcataaatgcccttattacgatgcttgggccaggtctccccaagcacatgaaaaactgcactgttttcgtgggtttggataccaaagaaaattgaatgactgaaaagtactgaagagtttaccttaaagggaggaaactagagcagaagttctccaaatgtgatctctagactcagaacatcagcaccccctgggaacttcttggaaatgcagattcttaggctccatctcagatctgaatcagaaactctggttatggggcccagcaatttgtgctttaacaagctttctagggaattctggcacatactagtgtttgagaccctctatccaaaggagagatagagtctcaacttagtattctatcctgcatctaggttatctctggcataatgaagactccctggttgtcaaggtcttggtacaattttttagggctttggagccatcctagaaatgaagtcctcccatatggatcaagactggaataattatccagttcaacccaccatccgtggaaaacccaatcctctagggaaaatcaaggaattatactcgaattaaactgtgctttgtctttttggtatagaaacattttaattaaagccttacagttaataaatatttaaaggaaggaccagaaattagtatcaaagaaataaaagttttgcagttttcatttttgtttttttgttgttgttgttgttattttgagatggagtctcactctgttgcccaggctggagtacaatggcacaatctcagctcactgcaacctccacctcctgggttcaagcaattctcctgcctcagcctcccaagtagctggggttacaggcatgcaccaccacacccagctaattttgtatttttagtagagacggggtttcaccatgtaggtcaggctggtctcgaactcctgacctcaggtgatccacctgcctcggcctcccaggtgctgggattacaggcatgagccaccacgcccggccgaaagttgtacagtttttacttattttaagctcacatctgatgtaagaatgtacagttaatgaactgttactctcccgtactggctgtgttttctacagtatcaaaaatatacttcaaggccaggcatggtggctcgcgtgtgtaatcccagcactttgggaggctgaggcaggtggatcagttgcttgagcccaggagtttgagaccagttgggcagcacagcaaaacctcatctccccaaaaaaatacaaaaaatagctgctagtggtggcatgcacctgtggtcccagctactcaggagggtaagatggtagaatggcttgagcccaggaggtcatgccttcagtaaactgagataataccactgcacgccagcctaggcaccagagtgataccctatctcattcatatatgtgtgtgtgtatgtgtgtgtatacacatatatatgcttcacaaattttacttatatatagacatagaggcttacatttcaggtaaataagataggctccgtataaagcaatttgagaataagaaagttttatctctttttcttgagtggcatgaaaagataaacaaaatactttatttacagtagagaacacagcatattcaaattcagtattgtgaccttcacctcaactggattagccaggtagtatgttacttgcttagattcctgggtcagatgtgtcctgtatcctttagcttttctgtcagcaaaaagggataattaggacacagaacctgaattttaaaatggtttcagtttaaattaaagattcccttgaattaaagctgattcccttcttaaaggtgattgatatttatgatttttcattgtctttgttctcaaggagacttttattgtcttactgcaaaatttttgtaaatatctttgagttctgttttttctgagtttatgtgattaaggttttgagaatatctagatatagtacttctgactttttccagacaagaaacaagacatataaacatatacccactcacatttacaaagcctaggagatgaagtttcacgtaatatggactttggcttaattttgtctcgttcttataaataatcctttgaaaatgtgtctcagaaaatcattaacactgaaaaaggaaatatgaaagacttagaattctgaaaattataacatagtagactttttaatttattatcatttgtgatttcaacatttttgtgggattaccttaagagccatgacactgtaacactttgtaattttgtaaaagtcctgattgtcaatatatgcccagtgagggttggtaaagaataaatcttggccaggcacagtggctcacgcctgtaatcccagcactttgggaggccgaggcgggcggatcacctgagatcaggagttcgagatcagcctgggcaacacagtgaaaccccgtctctactaaaaataaaaaattagctgagcgtggtggcacatgcctgtaatcccagctactcagaaggctgaggcaggagaatcgcttgaacctggaaggcagaggaggtggtgagccaagattgcaccattgcactccagcctggacaacaagagtaaacctccatctcaccaaaaaaaaaaaaaaaaaaaaaaaaagagtaagtcttgataagcacacttgtttttgcagtatgtagatttaaatttaactttgtttctgggtagaaaatatatccagaaaaaaagccaaccactagtgctgatattagaattgatgagaacacaaagtccaaggacatgatgatatttaccaaggaaagagcagcttctgctgggtgtagtagctcacgctggtaatctcacaactttgaaaggctgaggtaagagaatcacttgattctcttagtagttcgagaccagcctgggcaatgtggcaagacctggtctctactaaaaataagaaaattagctgggagtgctggcatagacctgtggtgccagctacacagaaggctgaggcaggcagattgcttgagcccaggaattcaagaccagcctgggcaacatggcgaaaccctgtctccacaaaaaatacaaaaattagcttggtatggtggcacatgtctgtagtcccagctcctgtggtgggaggatcacctgagcctgggaggtcaaggctgcagtgagccatgagcatgtcactgtagcactccagcctgggcaacagagcaagaccctttctcaaaaaataaataaatacattgaagcattctttgaattggcagatatatgttttgaacctaaatgactggacaccttatagagacaacaaagtgctccctaacactaacttaatcaagatgttagccagtaaatatttgcttatgaaaagatgaaactttactaagaattagaaagtagcagagcttattactttgatcccatgtttatataaatcactttctttttttaattattaatttgcattttatagcttcaattatataattacatgttacactataagtgacatttgaaaaaattgtcttaggacaactgtcatatacatcaaggtctgtagtgagaatgaggaaggaccataatttttataagattaattttttttttttttttttttttttgtgagatggagccttgctctgttgcccaggctggagtgcagtggtatgatctcggctcactgcaacctccacctctgagttcaagcgattcttctgcctcagcctcctgagcagctgtgactacaggctcctgccaccacgcccgggtaatttttgtatttttagtagagatagggtttcaccgtgttggccaggctggcctcaaactcctgacctcaggtgatctacccgcttcggcctcccaaagtgctgggattacaggcgtgagctaccaagcccagccaagattaatttttttttctttttgagacagagttttgctcttgttgcccaggctggagtgcaatggtgtgatctcgactcactgcaacctctgcctccctggttcaggcaatttccttgcctcagcctcacaagtagctgggataataggtgcccgccaccacaccccgctgatttttttcatttttagtagagatggggtttcaccatgttggccaggctggtctcaaactcctaacctcaggcgatccacctgcctcggcctcccaaagtgctgggattacaggcatgagccaccgcatccagcccaagattaatttttaaatagcaatacttcattaaatatatatatatatatcttgcagttagaaactgtcataaatgtattacagtgcttggtgctggtttgttttgttttgttgtttgtttgtttgtttgagatggagtcttgctttatcacccaggctggagtgcagtggcacgatctcagctccctgcaaccttcacctcccgggttcaagtgattctcctgcctcagcctcccaagtagctgggattacaggcgcccgccaccaagcccagctaatttttttttctttcttttttttgtattttagtagagatggggtttcatcatgttggtcaggctggtctcaaactcctgacctcgtgatctgcccgcctcagcctcccaaagtgctaggattacaggcatgagccaccgtgcctgtcacatttcaggttattaatgagtatatttcccttgagctaaaagcatataacacagatttccatctataaataattttacatatgtattccaaagcccttggatgtagaggggaaatgggtaatatttagcaaattccagcctgtccttttcaattactaaagaaatacaggtatacctcactacttgaattcaggtgatttggatagcaatactgtatgtctgtagatttctctgctaaggcttatgtctagattttaccacattcaccaggcttagtgttcccaccctgtgggtagctgacatcttcacatagtttcttgtaataaaatataattaaatagtgtttaaatgttaaattagattcttcctccctctctttccctttctccatccatcctcagtttaattagttacccagtactttttccacacccaccatttggaggaagtttgtgacagagtgagttgatgagggtacttttgatttcactgtgtttcctattgcagtcattctctgaaaaatgatcaaagacattggaattatgaaagacagcaacagactcggcttcagaagatcccattgagtgtttttccttgcgctagttatatagtcagtttcccccttgtaaattattacagtgggggatttattagggaaaacatcatttaaaaattttaacggccgtgataaactgtcatttgcagttctcagctgacagtcaaacagctgcaatctgttagtgagcttttactttcagctgccagaggtctttcaactcctgttcccctggaaatgaggagggctgggctggacgcatagaagggaagtgagggttgaaatacacattttcccataccatatttttcatgcctccccacagtttccatagaaatgggaacataaataacaccccaccccagactttgaagagcaatcgtttatgtgtaaactgcagtagatggaccttaaagaggcacacaaaataagctaatcttagggtctttcctttacttgtgtttggccaagcctaatttcagatagattctcatttgatttactctgtacttaaaaaatgattcgatttttttaaatcaatttttagaaagtttgatattacctttttttctgaaatgagaattatcttgaacatactttgattgataggtatatatctgttgtttatgtgttaaaaatctagcaagcttggtgttctaactttcctctcatgtttgttctatccaagattaaagaaatgaattttgggccaggtgtagtggctcatgcctgtaatcccagcactttgggagactgaggcaggcaaatcacttcagatgaggaatttgagaccagcctggccaacatggcgaaaccccgtctctactaaaaaagtacaaaaattagctgggtgtggtggtgcgtgcctgttaccatctacttgggaggctgaggcagaagaattgcttgaacccaagaagcggaggttgcagtaagctgagattgcgccagcctgggtgatacagcgagactctgtctcacaaaaaaaaaaaaaaagaaaaaaagaaatgagttttgatttagggaatgctccaattgcatagtataaaaggtcttctcaaatagtcttattcttatgcattattttagaaattgccccacagaacagaggtaattattggctctgtcaaacatatcagagaaaacttccaaatttaattggttatcacaattttctcatttaggtaacaagaatatcctatgttaaatgcatttctatgtttttccacttatcagctctgtgtcatcacatatttcctgtaacacccgtacttgaggaaaatgtatgggcatagtctttatctgtttcttttattccaacatttaactaattaacaaattccatttgaatcatgagacagtaagaatatgtgtaattgagtaaatctgctttaggcatctactaagtattcagctttatgttaggttgcagtagataccaactgtaagtaaggcagaattttttccttaaggcatcccaatggagtttggaaaattcataccccaggaatagctcataacagccatatgtgattattacatgagtgacatagactgattcccatgactaggaaaacttgtttcctttccctttctactgtcacctttttcacaaagtccctttctcctgatttattttcataacttcctaaatgtcctttcaattgctacctttctccttttgtttgtttgtttgtttcttttttttttttttctgagacaggatcctgctctgtcacccaggctggaatgcagttgcacgatcaatcatagctcactgcaacctcaaacttatgggcttaagggattcttctgcctcagcctctggagtagctgggactacaggcacataccactgaccatgcctggctaatttttttttaaaattttttgtagagatggggtctcgctttgttgcccaggctggtcttgaactcttgagctcaagtgatcctttcatctcagcctcccaaaatactagaatcacaagcgtgagccactgcacctaaccctttcttcttttctttatcttcccttctactttagcatatacatgatttccagattcatatttgtaaaaccagtcttgatccttttactattttaaaacctcagtgatctcttcacatcattgtgacaagatttttcttttaaaagacagttctaacgtcagatattctgcctcataagcctggctaccaaaacaatccaaaaacttttattattttaggttctttcatattccaaattgcttctcatatccagaatggatgcaaacatctgttaagaccatctgcctggtttttatttcagaaaatatggtcactgagctagcaactaccaaaataggttcatgctttcagcgattggcagcaacctagacagtcttcattctggcttcagtgtattccttccggcctgctctgcaggtaccttatgccaggtcatctagctcctcacccaaacagaactgcttagcacattcagtaggcccacattttgtagctccatgcctttgcttacagaagtttcctttaggtatgaggaaagatagaagcaataacaagttgttccttccatctggaacttcttgtccctccctatacccctctcatagccctatcctactgtaatacaatctgtaatttacattaaaacaccccagtctacacagcgtgttagttagtctacaccttggatgtgagtgattaacatttgaaacactgataagggaatacatagtgtaagggtagttgtttggcattggaaataccctaatgaggagataactactgtaaatttaacctgcttatctttaaatctacaccagagagttttctagttagcataaaggatgtcagaaataatttcaaattggattgattagaaataccatacaggttcctctggcacatgaattgctcataagattctggcaagccaggtagcctaatgcctgcacagtgtcacccgaggcagagcactgttcgggcctgttgactatcacctaacagaagatgcttcctacctggtagaaaggtagtgaggagacctatggccatgcctgtcttcagtctttggaggcactgatatataccctcctcctcccccaccaaaacgaaacaaaacaaaacaaaacaaaacaaaacaaaaccctgacacttcggaatggtcaatagcaaaacctccctccaggacgatgcttacatgctatctcttccttaaagtctatcctaaatttcctgatggatttgtgaactcattctcctctacaccatcatagaatgaggcttatatttctgttatggcattaataaaattttaaaatttattgtaagtttcttgatgaaaggactgtgtcataactttctttgtatcccacatagcatgtggcatagtgtcttgtacacagtagatatttattataatgagcacatgcatgtacttaccaattctgtaaggaacagatccagctttgggtcatagggacactgggagccaatgtgtgagttcttagagttccattaattcactgttcatagttctaagggagtcaggagtaattgtccataactacatggctctagttagccattagtgcaaagacacactgggactgatgtcaacagcagaggaaagtagtgctgtctatgttgtcttctttcagaaactcatacctaaatgtatttcatactgctgttcggccaaatctggctctagataataaagaaggacaaatatttagggcagttatttctcttgttctatatttcctagccaatttgaagcagtatatataactaaccaagtacaccaggagaaaagtaaaggaggtgcaattatagcacacagatttaaaaaacaaagcaaaataaaacatttaatgttagtaagatgatagtatagtataatagttcaaagcaaggatattaaacccagactgcctgggttcaaattaatccccactttactagctgtgtggccttgggcaagctatttaacctttctgtgcctttgttcttcttctgtaaaatgaagatgatagaacagcacctacttcagagatgtgaggctaaaatgaattcatacatgtaaagcatatagcactcagtgcctggcacataggaagtgctggatgtgtttgctgttcctgcagtgatatggttaaatcatagctccaaaggcagaagtatgctaatttcagtcagtgtgcagtccttctgtctgtgtgctttgcagttctccgcctccaactgagtaatcttaatgccttgaagcccccaaatattggtgcttatacctttcttgtggaacctgtcacattctaccctaaattatataattatttgtaagctccttaaaagcagaaactatcttctttgtcttcctctcagcacccagcagaatgattacataacagccttgcttacacaatagctctttgctaactatttggggaaactatgaacctctgtgaggttggtccctggaggccctgcaccttggactggttcctgtgtacctctcgtactcttcagctagcaatccctctcctcactgtgctccagcaactggccttaagtcccttaaacatgcatccttttccaaaactggcttgatgtgtgtgtgacctgtgcagtcacataggtcctcatacttggttgaatgctctatcactagcttgaaattcttagtttttgtgttcaatttttatcttgcactgagcctgcaaattatgtagccggtcttgctcttggtcatcctgtgctcattgttccctgtgcctggaacaccctttctccctaatcctcactggctaacctactcttcaaggctcagcttcattgtcattcctcagagaagcaataaaaattagagccatgtattagtatccctccacattttcttctccctcagagcacttaacttactttgtaaatacagtatttatttatattgtgattatttcttttaagactttatcccaggctgggtgcggtggctcatgcctgtaatcccagcactttgggaggctgaggtaggcggatcacgaggtcaggagttcgagaccagcctggccaacatggtgaaacctggtctctactaaaaatacaaaattagccagatgtggtggcgggcacctgtaatcccagctgctcaggaggctgagacaggagaaacccttgaacccaggaggtggaggttgcagtgagccgagatcacgccactgcactccagccggcgcgacagtgcgagactccatctcaaaaaaaaagactttctccccaccagactgtaaactcctccaggggatagactgtgcctttgttccaggacggctttacctgctacatagtaaatagtaaataaatatttgttgagtgagtgaatgaataaatcatttttagaaatgccaagttgtggccagatgcaatggctcacgcctataatcccagcactatggaaggcttaggtgggcggatcacttggggtcaagagttcaagaccagcctggccaacatggcgaaaccctgtctctactaaaagtataaaaaaattagccaggtgtggtggtgtgcacctgtaatcctagctacttactcgggaggctgaggccggagaatcgcttgaacccaggaggtggagcttgcagtgagccaagattactccactgcattccagcctgggcaacagaacaagactgtctcaaaaaaaaaaaaaaaaaaaaagcaaagttgtatggataagcttttcttcccaagctaaaaagttgatgtataaaaatagcaattcaaggccaggtgtagtggcttacacctgtaatgccagcactttgggaggccaaagtgtacagatcacttgagcccaggagttcaagaccagctggggcaacacagtgaaaccccacctctacaaagaaatcagccaggcttggtgacttacacctgtggtcccaactactcaggaggctgaggtgagaggatttcttgagcctggaaagtcaaggctgaagtgagctgtgattgcaccactgcactccagcctgagcaacagagtgagaccctgtctcaaaaaattaaaaaaaaaaaaaaaaaaaagtcagtgcaatcttcatgcaatttaatattgctagtgatgacttttaaccagttctacttactgtctttatagatggatgaatacagtaaaattccccatttttcttttccactgtttgttcttctcatataatctggtatagtaaagttgaatctctctaaagtcagatttactcaggttgtcttatacattagtttcaaattaaatttcttagagcataaatgtctacagccttctgtctcttgtatttttagcaagcgacatgtatttacttttgatctaattgccagcgacaattgacataaaagtaatgcttcaggtttcttagcattttatggtggaaaggccagtactatgataatgaagttaacacttgataataatagagaacagtgtcctacttggttttcccatcattctttctctcctctcttattgtctgtgttcaaatagtttaattaactcactctgaatgcacagctgtatcagctttctgtggtccaattttggaactatatctgtttattctactccctggaatcacaccaatacaattcaacatgtaaccagatttaatgcttgccatcttactgtctcaatttttagtgcttggtagtcattccattactctccaaatactgtactaaaatttttaagtgataaatttctaaccaaaaacttatttacaaatggatttctacttgagatttacaatggattttgagcacctcccccaaaagaaataaaaaacatccaacatggtatactaacttgatattattgcttcttaatttttgcaaagaggaaaagaatcagaatttgcataatttagccccacattgagaataatcaatacagtgagagaagaatttttattgcttaaaagaaaaacaggctaaatgtcctttttttttttccttcaagtgtaaggaatctgagaaaaacagattttaaaaccaatagaaggaatggttatgatccagcagcaactgctgcatgtgggtgaagaaaagaacccagcattatttgtacaaatccataagggatgcagtgggaacagaaagaaacaaggaagtataggaaatagagaagaagggcactcagtgaagatgtaggcctcaaaaaatgttccatctaagcactgactgattccagtaccttaaggtgatctgctttaagctataaatcttctgagtggtttatgctctcaatgcttttttttcagaaggctgtgagaggaggaaaaatatattattttcagtctgccccctcttaagactttatggaattttaagcaggcttctcctagagttaaattcctgattcaaccaccccagagtctatttggctatctgtctctctctctctctcttttttttttttcctagcttgcccagaaagattaaagtaaaggtattctttctttttcttttttctttttaatctcctacgttatgcctggtaatgtggcagatatcttaggttcattacctctcagttatgcattaacagcacctccatccttgagctgattagctcagttaactgctgcaggctactgacgaggcttatcaaaggtcctaggtttgagagctatgcatgttggctagatgacaggcaatgtagatgatagtcatgtaacatagtgtatgactaaggctttaactttggtgtcaaaaagaccttttgggtagctgggtgcaggggcatgttcctgtagtcccagctacttgggaggttgagtcaggaggacttcttgagcccaggagttcatagccagcctggcaacatagtgagacccaatctcttaaaacaaaagcctatagggtctgtcattattatagggcctgtgtgtgttacttagtctttcttggtttactcaatttataaaacggatatagtaacacccagtttctttgtgaggcttaagaaatataaaaaatgctaaatgatggctgggcactgtggctcacgcctgtcatcctagcactttgagaggccgaggcaggtggatcacctgaggtcaggagtttgagaccagcctagccaacatggtaaaaccccatctctactaaaaatacaaaaattagccaagtgtggtggcaggcgcttgtaatcccagttactcgggaggctgaggcaggagaatcgcttgaactcagtgggcagaggttgcagtgagccgagatcatgccacttcactccagcctgggcaaaagagcgagactccatctcaaaaaaaaaaaaaaaaaatatatatatatatatatatatatgtgtgtgtgtgtgtgtgtgtgtgtgtgtgtgtgtgtgtgtatatatatgtatatatatatgtatgtatgtgttcagtgcttaggtcagtgctgcagcatgcattttgtgctcaattaaaggagatggtcatcgtagttgtttgtgttaccctattacaaaacataaacaattcaagttctgagtaagaggtttaagtaaattgctcataaaattatatagctagtatttggcagagaaagttttcaaatgcaagcgtgtttaatttttttctttttttttttttcagacagtttcactgagctaatttttgtatttttagtagagacagggtttcaccatgttgatcaggctggtctcaaactctcaaactcctgacctcaggtgatccacctgcctcagcctcccaaagtgctgggattatgggattacaggcgtgagctaccatgcccagccaagcctgtttaatttctttctttctttcgtttttttgttgagatggagtttcgctcctgtcacccaggctggagtacaatgccgcgatcttggctcactgcagcctcagcctcctgggttcaagcgattctcctgcctcagcctcccgagtagctgggattataggcatgagccactgtgcctggctaatgtttttgtatttttagtagagatggggttccaccatgttggccaggctggtctcaaactcccgacctcaggtgacctacttgcctcagcttcccaaagtgctgggattacaggtgtaagccaccgcacccagccagcctgtttaatttctaaaccacctcaaataaagtatcaaagagaaactgctgttcaaataattgtgctcgaagaatatggtttttctcttctttaaaacttgattttattcttatatccaagctgcttatataaatagattcttgaaatattttgggacactaaaatagtccttcctgatcttacaaatttcttctctcctaaaatttatgtataaattggttgtttgaaactcagaatggatattcccttaggaagtggtggttgtgttctcaggccaattcataaaagcttctctagcctgtctcttctccctttctagtgcttaatgtttagttcagtggttttcagatggacagtatatcaaaactgcctgagtagctttgtaaagataaaggtacttgaacaaaaaaaaaatgagaaagaatgagtaagacctcgtgtatgatagcgcagcaggatgactatagtcaataataattaattgtacatttaaaaataactaaaagagtataattgggctgggtgcagtggctcacatctgtaatcccagcactttgggaggctgaggaggtcagatcacttgagcccagggtttcaagaccagcctggtcaacatagcgagaccctgtctttacaaaaaatacaaaaaattagccaggtatggtggcgggtgcttgtagtcccagctacaggctaagaggtgggactatcacttgagcccaggaggtcgaggctacagtgagcggcactgcacttcagccgcagccacagagcgagaccctgcctcaaaaaaaaaaaaaaaaaaaaaaaggagtgtaactggcttctttgtaacacaaaggatcaatgcttgaggggatcgctaccccattttacctgatttgattatgacacattacatgccagtttcaaactatctcttgtaccccatatatagattaaattactatgtatccacaaatattaagattaaaaaaaagataaaggtgactgatcatacctcagatcttctgaatcagaattttagggtgaatgtgctcgatccatcccagcagaagcctgaggcaggggaggcatgatgtagtaaaggtactagaagaagtcctgtgtggctggagcagagaccggttgtctttaaactcttgattgtgatccttgtgaatgaaagtcatatgagccgataccaccaatatatgtatattcatttttaaataaattagccacctgtactacaataagcacaaatattttttaaaagatgaaataaaaatagtccttcctgactattttcatattctaaaaacagaacatgaaattctaataatcaccttttgctttctgtacctatttggatagttttatgtactttctgggatggacaaaccacacttttgcaaaatataggcaaagagagtgaagggaaggtagatagagactagattctgtaggaccagcagagccaagtatttctctatcctaagtgcaataggaagcaattggaaaatgttaggaaggaaaatgatgtcagatttgcatcctggaaaaaattactttggctgcccaatagcaaaaagatttagtacagcaactatgaacatggggagtccactttggaatttatggcactagttctgatgaaaggtgattatgccttgaattgggcattgccagtgaagtttaaaagaaaaacaagatagatatttttgaggcgtacagtatagaatctagtgatggattgcctgagcattggttgggggagcagacaatggtgacttgtgggtttctggcttgagcttctggatggaagatgaacagtgggagaagaacaaattgggggtagaaggtggggtattagtccaggtttaaatatcttgaatgttaaccatccaaatgatgataggaagttcacaattggatatgcaggctaagcttagtagaagttctgggcagaaaactataaatttaggagttgtcaacacatagtacagaaattcctctacctccagatattatttattgataggaaatatctaaagcagaagtgccaaggagttccacaaaaatattatacaagattagacttacaggactgaagatgaggaattaaaaatgaacaggtaagcagattctataaaatgcaagtctcccaaaattgctacagcattgggaccacagcttatactagaatgtggcaaataaagtacaaatcagtatttcagaagctctcaaagatactttgatgagcatgctacattctggagtaagccacaaacattggaaagtggctcatgtcatataagtattcatgaataaaggtccaggtacatgtcacaagtgtgcacaccactaggattgagtaattgggaaagctagacatgtcagatgagattaaaacaagtacagcaccatagattgtatgttagtatgaattcaggaggagaatgcctgggaatttgatgtctgtaagaagccttggaaattatgttagagttgcaagagagaagtatgtcctttgtccccacccccttaaaccattatgttccttaagtattagaatacaactaataatcatttacaggctctaacattctctgaaggtttcctcctgcacccaagacacatggggcaaaatatcattgtttaatatgttccctctcctcctagtgctaaaagcttaaaaggagtcaaagtgacttcttttgctgaccactatgaagaggattaagtgaagcctatagggcgtgttcctcctcttgatggatgccttctcctgattccttttcatctgtttcttctcgagtgcattatactactgcaaactgttagaattttggttgccactgatccactttatgtccagatcttgataagtccttgcaaaaataactgtgactctgacttggaaactctcagtaacccccaaatttccaaggaaagtgatactatattacatttctattttttctctgtccattgattaatatattaaatgagataatttatattcatcctaagaaactgtctgaagtgagcaagagtagcacataatggctagcacctttggcctattaattttctaggcacctgaactgagcaccaggaatcttcacttctgaaaatgttaacttgggtcatatcagcctttaaaaaagaaaaacacagtgatgtactttaccagtatttgcatccataaattaatatttttgtatctttcatttctgaattacagaagcagattcatcaaaccctgaatgatagctcttacaagtgactggcccaatgttaaaactgagcacaggagaaatgctctgtgttttaactgggcaaggaagcttgcataaaccagtcatcatgaaaatcctcctcactgaggtgcttctccctctccaaccctctgtcccacaaatttcttcttgatcatctttgtaccttttataaatatctgttattgcgcttatgaaactagatgataactagacacatatttggcactacgtctagactgtcagcttcttgagcagctttactttaatcatctggtcccaggcagtagagcaaagtggttaaagagggcaggctctggaggccaactggatttcatttctgtatgatcttgggcaagttacctatcctcaacttatttgtaaaatccaaataatacttccctcatggagttgctggcaggattaaatatagatttttctaaattaataggcttaaaactgttaggaaattttttgacttgaaggaattacatacttagtggcaattactgctaaccaataacaaagcagagggaagtggacatctgaatacatcaatgcagtgctaaaaaccttgcacactggtccaggcctctcttcttgtctttattgatagtttagctcagaggcttttagtatgaatcccacatcttctcaagcatgtacccctcaaacctaccagcccccaacatccacacctggtttagaaaggtttgtaggcatcctgtttgtcacagtgacaggcagccgctactgacatttaataggtgaaatcataaatgggcccagggatgccatgggctcagaaatggagagcggagtctacaccaaaaattattccacccaaaatgccaataatatcttaccttgagaaacactggtagtgcccagggtcttttctctactaaaatgcaaaaccaacttttcacaaaattaatatactatttcataaagtcagaatatgccaaagatcatgccatatatattacagagcatagatcaacttgaaaaatctttacgtatgtattctgttatttctcttttctgtgtgtaagttcttttcaagttactacagtgagtttcaaatttgttatttaagagttctattattctgttcattatgatccgaagtttaagatctgcggtgttgaaaagcactcctaaatatacaaagcccttgaactcctaaataaacaaagcccttgaactcctaaatgtacaaagatcttgtttgggccaggcctggtggctcacacctgtaatcccagcactttgggaggctgaggtgggaagattgcttgagccttggattttgagaccagcctgggcaacatagtgagaccctggctctaccaaaaaaaaaaaaaaaaaaaaaaaaagctaggcatggtggtgtgcccctatagtcccagctactcaggaagctaaggtgggaggatcacctgagtccaggaatttggggctgcagtgtgctgtgattgcgccactgcactccagcctgagcaacagaacaagaccctgtctcttaaaaaaaaaaatgatgattgagtttgataatcaggaaacttaaccaaatcttatatgtaagcaaataaatatgtttttatttgtttgttttattttgagacagggtctcactctgtcacctaggctggagtgcagtggcatgattttacctcattgcaacccagcctcccaggctcaggtgatcctcccacctcagcctcccaagtagctgggtctacaggcatgtgccacgatgctcagctaatttttgtatgttttgtaaacacaggttttcaccattttgtccaggctggtcttgaactcctgaactcaagtgatccacccaccttgacttcccacagggctgggattataggcatgagccaccacacctggccaaaataagttttattagaaataactcactttgggaggctgaggagggcagatcacttgaggttaggagttcaagagcagcctggccaacatggggaaactccatctcaaataaaatacaaaaattagctaggcatgggtggcatgcaaaaaaaaaaaaaaaaagaactaatgcatgtgaaattcaaatattagtaagtattcaaaataagatatgaaagtaagaatacaaaatagggtgatatcactggttgatatgattagtgagatgaacattattaaggcaaattcttccgataattattgttatacaacatgattaatatatattcagtctgaaagagtcatatatacaaatatgaaataaacacctcaaatgagaagaagagagaaaacatggagaatgaagaaagttgggtgtattcttttcagtcttcccctcccatatctccgtctgaggccagcatggctaatattgagaaagagtaaggcaaatgagtaattattgtgctctgtcttttactgttattgaaggtcactgtttaacactccctcgccattcccctaaccactcccctttgccttaaattcattaagctgtattctttgtatttcctgataacagctgacaaggacccactctcatctgtaatgacaggtgagggtattgatgataagtagagttaataaagcttctccagtgatttagaattataacgctctgagtattatcatcaggggaatagatgaaaaagcccatttcattttgtgcagtgtccttcaaactgctggttatgaaatcattttagagggtctgtgaaatcactgtggaatacgatgaaacgtaatagaaagtatcagcagacactgtgggagatcggtcagagcggtggggaaaaactatagggaaaggacgcaaaccttctgaaaggtcagaaggttctgcagagccccaggggagaatagctgaaggcagctgttctgtaaccctgaggcattgggcaaggagtaggtacaaggcagtgtaggggaatttatcttaaacaaacttgtttacttatgttgaccaggaactgacctttgatcatccgtggggacggtccccctgaaaggggaacaataaatgttaattacctaagaggtttttaaatttctttctccagaaagaaaaatttcaagcgtctgaatcccattcagtattctctaaaataaaatcaagtttgtcctgaaagatggtttaaaaactgaaaatctattttctttgattacctcataaataacaagagtttcatatcagctctcctgtctcttcctcctccactcttttcccctctttcacattgtgccaatcacacaggtggatgctcagtatcaccccacagcacaagataaataagcttggaaggtttcctagcaacatattgttctgggaacctgctctgtttccctgaacaagatgaagccaaatatcctagaatctcagccagatgggaaaggattagcttattgagagtgttattgccttttttaaaaaaatgtttcactttgaaatgaacctcttaatataagtagcaaaagtgacttttaaaaggacatgtaaaaatatccctttaaaaggacatttttttctcttacatgtaaaaaaaaattgataatagtttgaagtttaaaaatatggtttcagaattctctaggcacaagcttccagtatgtaattcagtcactggtgagtggatccattttagaaccatgtagaaaatacttccacatggaactaattctcagcctggtgtccagtggtatggtattcctgctgtaaaaatactgaaatacttccgatctggtgggaaaatggctcctggagtaggctctctcctcacaatacctttagctgctccccttggcccttgtttctgctcctagggaaacattggagacaccttgttactgcttaaaaccctgaagcttcccctttttctatagctccagggctattttagtgctagtgatttgcaacttcatcttcagagtctatttttggttttctcagtgtatgattaatgtatatagagaaaataaaagaaattgagactgctatcaaagccaagaaaaataatgttgtcgttttgttaacacatgattgtgtatatttcccttgtttatctaatgatctgtgaggctacacagttggcaggtggtgctttcctttctattgcactctagttggtcacagtatacttgttagaggtctctggagatggagtaataaaggattcgtgtttctcataacaatattcagcagtggctttgcaattcagttacaccctggaaaatgtcctcactccttgtttggctggggagacattcccccatcagccagatgaatattctcataatgtggttgttgactggtttctatcatctatcaggtttggactgagtttgtgaaacttcccaattgtggtgagaagcagataattctagtacttcatagtgttcctggataagaagaacaaagtaattagaataagatggggaatgacacctggagtctttgttttttatgtaacaaattatctggccagatgccagagaattagtactgtcctcattttaatgaaaataaggaaattgtgagataattttatattcatgctagatgctttccattctcttttgctctctcactcatatgtatatgttttctaaataccatattttaaactcaacaaggaacaatctgttgagggcctagtatgagccaaatactgctaggtattatggcagatactgagggcaacacatcatccttgccttctcagagtacgcaagaagtttgcaacatagcacgtttgtaatcttaaaccaaacaaaaacattaaggaaaggtgttgctgtgtaaaggaatcataggctaggcacagtggctcaggcctgtaatcccaatgctttgggaggctgaggaaggaggatcgcttcagcccaggagtttgagaccagcctaggcaacatagccagaccccatctctacaaaagttaaaataaaataatataagtaagggaattctataactttgattgtccaaagaaaggctaaaagtagatttaatatgtattatggaacagaataagttctaatacgttaattttgattgaatacttattttaaaaaaaattttaaaaatgtccataaaccaggcattgttttagatacctctctgttaactcatttaattctcctgacaccattatgaggtagaaattttgtttacctgctattttatagatgaagaaactgaggctaagagagtttttttgtttgtttgttttaaaagacagggtctcattctgttgcccaggctggagtaagtggccgtcatagtgcactgcagcctggaacttgtgcgctcaagcaattcttctgtctcaacctccaagtagctgggactatagatgtgcaccactgtcccctaagagaggttaaatatctgtttactgagggcttttatactacgctgtgcttatttgtttatttttaaaattctaagagtccataggaatctagtcttttttcagaaaatagtaaactactgtcttttgtggatgacataattttagcaagaaataaatgggttgtttagatgactttctattatctcatacagcataatgattctatatttgagttttcattgtcaaacactaaaacctcctttgttttcagtgtactaactccattttagaatatttttctcttctcttctttttttttttttttgagactgagtctcgctctatcacccaggctggagtgcagtggtacaatcttggttcaccgcaacctcagcttcccaggttcaagccaggctcatgcctcagcctccagagtagctgggattacagatgcccaccaccatgccccgctaatttttgtaattttagtagagaccgggtttcaccatgttggccaggctggtctcgaactcctgacctcaagtgatccgcccacctcagcctcccaaagtgctgggattacaggcatgagccaccacgcccaggccattttagaatatttcttgtagctcaattttttacttatataaaataataattttcattttcaacataatagaaggatatgagtgaattatatttaagaaagttaaaattaatagcactattaaatacattaacaagagaaggttgtgacatcagcaatattatttataacagaggtggacaaactgtagcctgtttctgtaaattaagttttcttggaacacagccaggctcatttgtttaggtatcacccatggcaggttttgtataataatgacagagttgaatctttgcaacttagactatatggcccacaaggcctaaaatatatactgtctggacctttacaggaaaagtttgccaacctctactctggaatctctatttttctcctaactttgagttgagcatgttcccttagaatgccagaaatttaactagcaaacacacctgaattttttttcataaatggtgtccttgtctaacatggttttcctcaaatccctgcaggtaccaaccaagaagctgaagaaatatgagaaagaatatcagacaatgcgagagagtcagctgcaacaggaagacccaatggatagatacaaggtatgagaaatatgttgcacctatcaaagtaccttcttttttgttttaaatgagactgagtcttgccgtgttgcccaggctggtcttgaacacctggcctcaagcaatcctcccactccagtctcccaagtagctgggattacaggcacgagccaccattcccagcaaagtacctttttttttttttttttttttttcttaaagcagcagttgtggcaagttcaattccctctgttcttccttgattgatttagatgctctctgatcatgctaactgtccaggtatgttttcatttcaggagactcccaaatagccaaccataatatttcttttctttcagtttgtatatttgtaggtaactccagctgttgcatttatactgggaatcttcataagaagctgagagaaagagaggggaaaaagaaagtggctttctactttcaaaaatgaaacaaaaaggaaaaatggcaaagtactgttttagctgtgcatgtcatatccacaaagacttttagcaggtgaactgttccaagactgacacaaggatgtttcaaacttgcctctgtctgtagaaaatgttaaaaataccaactcacttggaaggaaaaataaaaatcacaaaggtatattgagcacagtagtggtgtttgttgcaacatttatttccacaaatgaatttatgaacaacagtgatatttgagttaaagtatgaagtttcagaatcaaaataatttcattttaatacgttcgttaattgtgaatctcttcaatggtaattagcaacactgttcccaggatgcaaagttgggaaacacttatttccaacttatttttttccaagtaaaatattatctctcttcaacatgctttaacttttcagactcacacagatacgtaacagctccttctccctccatatcaatacactaagataaaagaatactgtattttcagcactgagcagcagtgccaaaatctcctgccaagaaatggactgtgtggcattattaattaaatcacccacattgggatgacttccacttttgtaactagagttatctttatgtggtcagagctggacataggcagcatagtcacacagaacatcttatctctgttgctgaattgaatagcatgggatgtgtgcagaggaacatggtgggagtatgtaggttttgtagtcagacagacctgaactcaaatcttgctcattttttagagcacaggatttggactccaaattgagggttttaatccccatgccaccattcagcatcttcgactagttattgaacctcttcctcatctataaaagatatagtgtttctgattccttgatggattgttacaaggatgagggatgctgtatgttaaggactcagctcatagttgtgttcaataaatggctgttattttatgaagcctactactacagattatgcaattattactagaataatgccaccttatgtgggtcttcccctctagtcccttattgattgttcttatttctctcaagtattgccaaccaataatctccccttgcttatagaagtggttcaagatctgattataaaatcccacatacttctatagcagataactattaacagataatgtttgaagctaattttcaccaccaacatcccctcaataaaaccagcttttaatgtaaatcacatagcatgctgctttagaaaggcttgaaggtagtaattataaactattattaagcatccaaaatgaaggtctccttttgctaatatcattcagattttcttattactacaattattatgaataaattctgtgaagagtgctttaaaataagagagaaatggaagaccaaacttgtacatttaaaatcaggctggaattgaacttgttattgtgtcttaaatccttttttgtgccaaagcaggtatgtatacattaatagtaagatgtacattatttttaaagtacttataacatgtaagattatcaatatgtatagtttttattgagagatcaaagtaggattaaacttcttgttttgaaagcaggcattactttttaagttcaagtattgttgattcttatttacacatatcggataccctctattgctatttcttttagattattgtgataacttgtcagtacattcatctaatgtctctatactcttaataatgtctaggcatttgtcctggtaatacacttggtgaatttatagttcttagattataattacatcttcaaggtggcagtcaacaacataagtttctaaccatcaacatatttggtttgtaagatgatcaatatgcagtttaagaagccatattataattatcttaattaaagtagcaaagttagaaaataccttttacatcttctaaatttaatcctatgaagaataagatctctgtcctgggaatgagcactttgtaattcatagatcttggactgggaacccagttaatgtaaactcttaaaagactgacttgggaagatctttgagggcattgagtgagaacttgcaccagttcagtaacaacccctcctcaacattagaatctatattgcttaaaaagtcatttccacaccctagcttgccatatgacaagagagttagaaggttgtgggaaatttattttttaaagcccacatatgttatataataagatattttaagaggtatttcagttcagtgctatttcttttggacatggtggcatatgtaaaagggctatcacagggaacctagaggtgggaatacagatccagcaatgtgaggtagctctcaacagtcatacttcttgctacatctatgtaaacatgtgttttatgtctatttttatgacatatgcagatatcttcatggttaggttatatcgctgtagtcacctttattcaacacttaaatctcaaccacaaagagatgaaataatgttagtataaatttaaattttaaaactcgacatatcttgaaaatcttctggaattaggaagtagtgatgattgcacaactttgtgaatatactaaaatcattacattgcacattttaaaaacatgaattttatggtatgtgaattacatctccaaagaaaaaaaaaagcagaatattccaggaggattgtcatttagcctacccttttcctttcatgaaccctaaatcacaccagaggtacctgtttagaagcaggagggagagcttcctgttgaaattagagctaattagtgactattgatcttatatgtgtccatatttgcagaataaaagccaacacagtgggtggtacattaatttttagtgatgcccattaatttccaggtagaacatatgttgtacattatatgtatacacacatataaacatatataagtaggtaatacacacacatatatgcactgcctgtgctacctggtcttggcatcagtttatattttaaactcagtgaacaccataatgactgctttatagcctttactctttctgtttttcttcatgactagattccaagagacagaaaggaaacttttttgaaagaacaatgtagaatgtttatttcaaatctcttttatcctctttcttaacttgcacctgaccaggtttgtgtaaaattctttgtctactctaacattttggtttgtaaatttagtgattgatttctaatgaagtgaaattaggataaagatttgactgtagaataagcatgttttcatttttatacaggttcccagaagacacacatttatcaatatgtgtagctgttttagtatattttagaaactagtaactaagcccttaataagcaaagttaccaatttcagaaattaaaatactttctatcttaaagagatgaattgtttctgttgtgaggaaagttttctagtgatggtatcagttgctggtactttttggagatctgtagccttcatctacctttggagaacgatatgcttttctggtttaattaaataactatttgcacaaatgtgagttaaggcttaaaaacacagctaattggccgggcatggtggctcttgcctgtaatcccagcactttgggaggccgaggtgggtggatcacttgaggtcaggagttccagaccagcctggccaacatggtgaaatgctgcttctactaaaaaatataaaaattagctgggtgtgctggcaagcacctgtagtcccagctactcgagaggctgaggcatgagaatcgcttgagcctgggagggggaggttgcagtgagccaagatcatgccactgcactccagcgtgggcaatagagccagactctgtctcaaaaaaaaaaaaaaaaaaaaaaaagaaacgaccaggtgcagcagctcacgcctgtaatcccagcactttgggaggcagaggtgggcagatcacaaggtcaggagaatcgagaccatcctggctaacatggtgaaaccccatctctactaaaaaataaataaataaaaatataaaaaaaaattagccaggcgtggtggtgggcacctgtagtcccagctacttgggaggctgaggcaggagaatggtgtgaacccaagaggcggagtttacagtgagccaggatcacgccactgcgctccagcctgggcgacagagtgagactccgtctcaaaaaataaaaataaaaatacaccccccccccacacacacacacagctagttaattaaattcagtgaatctcccaaagcataataaaggttacctgttctagatgggaaaatactaaaagaatctggaatgcttaaactctcttgggtttgggacacagacattattataaatacataatttctaattgaagtgtcttatccatgttcagtacaattaaatttagaatgtttaacctcattcttgagattaaacaaagtaatttttaaaatcaaaatgtaatttaaacaaagaaaatgattcctctatgtttccacagagttttttcttgcacatactggtttttgtagagcaattgctcctacatgtaatttcaaattaagctattatgcatagtaaaaataatacaaatgaaatatttgaaataaagcttaattgtacttttttgccatccttaaatatctaatgcaatagtttagagtaattttcacatttcttttaaacttgacaaataaaagtttaaattagtatacatttcttacctataaaaaagagggagtagactttttaaaaaaactgttggaccctttcttactcaggggagtcaagataagtgaatccatctttgaaaaatgtttttctggctgggtgtggtggctcacacctgtaatcccagcactttgggaggccaaggcaggtggatcacttgaggtcaggagttcaagaccaacctggccaacatggtaaaaccctgtctctactaaaaatacaaaaattagctgggtgtggtggcacataacctgtagtcccagctactcagtaggctgaggcaggagaacctcttgaacctgggaggcagaggttgcagtgggcagagatcgtgccactggactcctgcctgggtgacagagcaagactccgtctcaaaaaaaaaaaaaattttttttctgccatagcaaataaacttacattttattattttttcatatcccaaaaactgtgttggcttttggaaatagtatgttatgaaataatgtgcttttaaggaatagtaatagacacaaggatggtttatatatgcctatgataacttaatgataaacttcagaagtcttccactttctctttgagcttggataatccagagagttcattgttataggatggtgaagatgcaaaactaaatccttttggcttctcaagcaatatagctaataaggagtgggcgatttctaacaatgctggtctgctagagtcccttatacttaacccttgggggaagaatatgctttaggaacactaagaatttctagtatgtttactggtgatcttcagagttttcaagaaactttcattaatttttagaaagttttcttttctgtttaagtattactgagaaaattacctgacactaatatgtttctatatcatctagaatgcatctgctttttgaaaatttgatttgtgtactagagtagagcaaggatctgcagactgtggtttataggccaaatctggctcactgccagtttttgtaaaccaagttttattggaacacaaccacacctgtttatttatttatagtgtatggctggttttgtatgacatttgtagagttgagaaatttcaacatagaccatgcgacctgcaaagcctaatatagttactttctggcaatttacactagaagtttgctgacccctgtgcaagagtataacctaagatagttttttaagcgctgaaagaaatgcagtctgtttggccagctgtcatttatcactgacaagattttgtttttagtttgacatttaaaaatttgaaattttccactacaaagataaaattggatgtgatgagtaaaggagggaagcacaaaaccttcaaatatccatattttctttctcagatcttcattatggacaacatagatatttaaacattttatctgtaggcatttgaaaacttgaatatgatagctgtcaactcttttaaaagaggtatccaaaagaaaatatgtgagagttgagtgtgttgttgctaataaatttgcactgagtcttttaggaaaacattttctcctgacccttaaaagtctttaaaagcatgtgccaagaattcatcatagcagcagacaacacccaaaatattgagctagggtttataaagccgcctccctcctcgtcattttttcctttaaagcttagtttctttacttttaattaacagttcacatttctctggtttctcatcttgaaataaatgacgttcacaatcccttgaaccgcttcacccagacttcagcccccaggtacacatgagatccaggatccatttttcttttgcattgccctgcccagcaatttcattcttttgtctgaagatgaactattttgcaagatttctgaccttgtcatataaggaagttccttccacccagctttaacaacacagtatcaacacctcacaccgtagttccttaatagtcccacatacagcattttagtcattcatgcaaactgtaaacagcaatgtggagagggaggagtttgaagatatgagtcttcctgagttgagacttgcccactggctacctcaagtatctttgttccattgaatgtttgcggtcacagagagaacttagagttatatgacactcaaaggaaaagcaaaagagcattaagaagtgtctgtttttgttattgccatttcataaatattttagtaggtgttcaatttcattggatattctttttttttaattgtctttgtacctatgattgaaaacagtagttggtctatgacttttgaggaggtaagttttttttttaatctatgtatgtctgtaacatcagtgtctgtctctttgaaaaatgcagtatcctcctcccaaaagttactaaccaaactttcccagctgtacatctcctatccataaggggtgaaactatgaggacagttgttatctgctttttgttcaaacggtgtcagttgtgtgagatggggagtatatgtttcagacagtgtgatgtgagttttaagagttatgtaagcagtgtctcctgtaatcttttctgaaaggcaagagggagccagtttgcctgttttgtttacaggctttgagcatttagcacatctgcttgtgcaaacttacagcatgtgaatttctctgggctgactgaggttattggggctgactttaagtctgtcttccatgggcaacccttgtcaacatttcaaaatgaaccaagcagggttactgccttttccaagaccatcaaaaccaaactctcttctccattctagtatacaggcaaactttttctagaattggtcagtattgaaaacagttttggctccttgagaagaactgtaaaagacagccacgttaatataagctctgtttagccctcagtaggtaagtgtgggcaagttctttgtagaaaatctccatctcagtagcagggtctcactgtagtgctcagtagcactcaccctgggttcatactttggaggatgatactgcatttttggccccgtagcttgctttcccacttgtctgtgagtgcagagcaggagtctgacacttcccactgtgctgcttgctttgcagacactaaattgaagcttcttgctaaagcaaaagccagtaggcgtgccctctaggctattttgctttgcagggactctgagacactcagtttctcccaaatcttttcccacccttgcccttgcccctttagctgtgtgtctgtaaggaagggtttcagttgcaacagtcattgtaatgagaagttactagtcagaatttcagctgaactcacacctctttcttatataacagataatccatcagacatttatctctaatcaacagtgaagtagctacctggtatgatttctaaatacttgaacaaagtacttttccatgaacatcctatgactttacttggaggttactttaactcaattctaagcatgtaattgtaacctgaaaaactggtagtggcaacattttcacttgtgccaaatgaatgtaatgtacataatagtcgagggagctttttgtactttggggttatacaagtacaatttcaatagcaataggatacttaactcaggaatacctattgaagtagtcttatcttagtttcttgaagatatttatcaagaaatgagaaaaatctcttccctggctaagcagcctgcattgtgaaatatgtcatgttgaaattgtgctggtattgttactctttcctggctgggaggaaatttattgaaaaagcttctcaaatctttttttttaatctaagtttcctatatgttttttttccatgaaaaggagtaatagatatatcagaaataaaggctaactctccagcccctgctagaaattgtgttgcttaggcaaagattcaaagatttcattgtagaagctctggctttttagaaatttgttttttagtctccacatttattatgcttctgtgggagggtgtaacttctgtagattgaggggaacagacagaatctgatgagtacaagttgcctctacaagagcattcacagtcttctcaggaacatctagggaaagagttcctcacaaggcaccacttctgaggggttacattatatcttggtcaaaaaggaggatccaatatggttttgtgtagaatatgaccttctaacagaagtggacttaaatttttttttctcattttggcatcttatcccttccaatggaattaaaattctgaattcctttttttcttaataaaactattttttaaatcctattacaaatatatattcattgtagaaaacttgaaaacatttttaaaagaacaaggacaacaataaagaaaattcactacctacagttaatattggttgtttatattgttacaatgagattctccaattatttattggggtttttttcccccctacaaggaaggcagcgtaagcatttcctgttattatattttctttctttcttttttttttttttgacacaggttctcactctgtcacccaggctagagtgcagtggcatgatcatagttcactgcagccttgacttcctgggttcaagtgattctccaacctcagcctccccagtagctgggatcatgtgtgcacaccacaccacccagctaatttttttttttttttttttttgagatggagtctcactaactctgtcacctaggctgaagtgcagtggtgcaattctggctcactgcaagctctgcctttcaggttcaagcaattctcctgcctcagcctcccgagtagctgagattacaggtgtgtatcaccacacccatctaatttttgtgttttgttttagtggagatgaggtttcaccatgttggccaggctggtcttgaactgacctcaagtggtccacccacctcagccacccaaagtgctgggattacagacatgagccactgtgcccagctgtacccagctaatttttaaaaatttttttgtagagatggggtattgccatgttgctgaggctggtcttgaattcctgggctcaagcaatcctccggtctcaggctcccaaagtattgagattacagtcatgagccactgcacccagccttctccagtattttaacactgagtagaattctattgtgaatttatttaaagtattaaagtgatttgggattgtttttatcttttttagtcgatatgtttttcaataatgttttaacattctccaactattcttatttttttccaaaaaaaaaaaaaaagacagaaatgggccctggtggctggtataatcaaggtgcggttttgtcctttaacttctctgacagccttccctgtttatggatcctctgcctctgtgaaagcctcagactttgcccttaccatgtgtttcttagcccttgttttaaaaaacaggaaaaagaaagaaattgtcttctctttcaatataacaaacaccaggttgttatatagaagatacaattaacttcacattacctggtatgcta

SEQ ID NO: 430 - DNA, 71445 bp, Homo sapiens
tgggcttcaggccactcttcccctcatgctgtggtgtaaagtgcacccatcaggtggtatatctggttctgatggcaagaagaaggtgggggatctccttatagggcatgggtctaggagcacagatgggccttttgccccgggtaaatgcttgtctgtttgctgtcatgtgttctttgaggagtgagccatctcgagccctgctttgaatttactgggtcatagagcctctgcctgtgctcttttccataatgacttcatgtgacatgcacttttggtgggctcagataattggtttctttttgtttttgacctcaggctctgtggcagactggggaaaatggggcctggcatcattttccctgtcaatgggaggggctgttccatgcagggtgggaggggaccaagttagcagagagtagccaaggatccttgcttcttcctttctagtgtgctgtcatccaagcaggctcctggctgtagggatgggccttggggaagaatcttctttgaaagcatctatgataactgagaagtcatccctagttggagaaatccagtaatgagcagaaggaggaagcaagtgaggacagaggccattgtattacagtgtcacgcagagggccctcaatgatggggcattggggaaggctgtagacatagtcatcagaacatcctggcctggcataagctgggttttctcctgggaccattggtcctcagcaggagttctttgcatgagttgctcaggggcaagggctgcaagtgggctgtgcttaggagaaagtgacacctggcagtgagggaagatggtgagcattattagcctttgttgtccagcatggccttcttgtcctgtctgctctggagaggagcctgtgggaccagtcctgcctggggagggcatacccacacgtgccagctgattctgactctgaatacatcatgtccggacttgggggtgtttctgcagaaaaaggaggttgtttttcagccttgaacatcttcaggaggatagagactcttgctcacatattcttagcaaagggaagggtctctcatctccaggccacagagatagttcttccattgccctaagaggctaggctaaccctcttgacataacttagacagcaaagcacttcatcctgtagttgggctctgtcacctttctcttcagttggccacattctcgtttcctccatcctgctatgctttgtgtgctcgggctgtgtgtggggtttttccctggtggaaggaagcccagctgtgtattgaatgtccttcatgtgttgtgtgtggctcagaaagcctgtcacttggcccctgtgctctgagccgtgagggtggggaggtggctgttccattaaagtgggagtattggatggccctcttgaaactagaattttgccttttttagtatgcagtataaagtttccagcatctattggtaacacaaagatttgctggtttttaaaataatacagtaagcataagtatgtaagtttttagaattggtactagaagttggacagctagttattctcgagaactttatttcactagaaaaatatactaattggaaagcagtttccaggagttaactcagtttaattttcagtctcagttattttagcctgttgagtttttgatggcacacctttggagagatggccacgcctgattcccatttcaggggcatcagaccatacctttttaagaagctccgtgaatctagtcatctacccttcatcctgggcgaacagccaaaaagagaaggggacaaggtgtctttttctccttctcactggggtgacatgaattcttttagttaatggctgtttgcaaattctaaactaatgaaatacttagcagctaacatgttcaatctagtaatgatgagtttaaatctcaattgacagtaatgttttagataaacaggcccagtaattcagttgatgaactgtatatcttctcagtctagatttgtaaatgtttaatgaattcagggttataagcatagttctttaagtaagattccagatagttgatttgcaaccagcagtctacctatgaatgtatcccaaacctttagaagattggaaaagatttttgaaataatgatttagttttgtaggaaaaacacccccttgaaaattaattcggttgacccagtaacattttttaaaacaattggtggctccaaaaggcctgccaacaaagaaaagtccaaattatctagtgggacattttgaatgttttatgtttattttgggtccactgtaaactttggttcaaaaaagaatttgaatttaaagaatttaccattatttaaattattaccaagtttttacattttcatgatggtattttccaggtatgaatgaaacatgactttttgattgtggtacttcctgtatcccctgtagtgccaaaaccagtgatactttatttgctcctatggcagctcatagaggtaaccgaagtgatttttcctcagtaattgaaacacatattctctaaatgccaatgtgtggtgatgggccctgcactgccttcatttctctagggcagtgtctttggattgtctagggcctaggtaattctgagaactactgtaaaccaaccacagggcactaaagcaatgtacacaccactctttgtgtgtatggaaggggttatataaacctgggctatgctggacatctacagaagagtattacattcacttgcaaagtttacatttttgagctcacagttatgaaaaatatgacccacaagtttttcaggcaggtgaggatgggtcttcttgcaaatgcatgagttctgtcttgagtcctgggaacttctctgttggttgagtgtgggctcattccctgactctcctaatcatgtttgcgtcagaatgttagcattgtaaataaaagaataggttgtataatagatacacaacacttgaaactttactttaaaaaaatcgatagttctacatatatatttagttatatcacttgacagatttcttctacacagtgtggagattgttttataccacagattatttttataaagttagtgaatttgaatgattttgtaatcagagctaatgagctttacctttcaagagaaacgtacactggagcatgagtggtgtggaacttttacttagtgtttatatggattcttgtgatacactggcagactggagtcaatttgcgggtcttttttggccaaaactccacttgtggttgtgtaggacagtgatattcagctcagcttcttgtggattgggaggagagagggcctgcaatgtgttttacattggtgcttcctcctgagatttctgttgaacaaagggttctgaggtcaaaaattagtttgtaagcctttgccataggacatagtcatgtgagagtgtttgggggaacagaaattgtataggggtgcctattggggtgggatgggactcgaataagattcaggtacaaaaactttgaaatgagaatctggtggtttgagtaatccaccagactgaattatctaagatcacattatccaggttggggggcagaattacccagttaagtaattgttcagaaaagtggggagggtggcatgtggatgcagtgatccaattaaatggagagctgccaggcacattttgtcctctctggtcagtgagaatggttgggttggctcgctgcttcaatctgtggaatcagccaggagcccagtgaggaagctcagaaccccagtaacagcagagcatctttcagatagctccagagttttcctgcttttctgaggaagctcagcatcactgccacaatacggaaagtggtcttcattttagcctatttatttttaggcagagagtggatggttatttgtgtgggacttttggtggcgatatataatgaataattaagttaatttctggtatgcataatggccagtcctgaggcccagctgaagacctgtcccccagaccctgcccgctggcttcaggctgctgcttctagacagaggtgcactggacgggatagttttatcaagagaatccctaatgtgtcattttaaaccagctgtgctttttattcattctggttgagcgtataggtttacactttaccctttttatacttggaataaatttagttccagcagatctagtagcactccagaaaccaaccccatctgttccccataaaaagaacattttctctgctctccagccacgtgtcttggaatgtaattctgttgtgcctttgtttttatcactctcttcgccccaaaagcaactgctgtaagcttttttctacttgtcttttctagtccccaacctctacctttttcctttttcccagccctaatttctggatgcacttctgtgatccaggtattttaagaaccagttacctcagacctcatgttgaacagtgtcgccatctgggtcctcttgatactgcagacttttaacgtacacatgcaggaaccctgctgagcgtgggcacttgttttaaagcaaaactcttcccaaggactgaagaaagggcttctggcaagctcgtcatggcattgtggtgggatgggtctagagtgtcatctgaatggtgcttcctgtgttcctctttgaattctgccattttcagtattcttgtgtgtctgaataggcaaagcgatttaattggctggtcttgcacgcaaattagttccaaagataagctctttgtaacacatttccagtcgctaatgctcaaatgtagaacattcctttaaatggcaggataaaaaacccactatccaccatagtgcattttgggaagatgtctgtagcatatgttgctgtgaaattaggccttgtgggatatggctgtttgtcattttgatgtattttaaataaatatatatattttttaaagagccttttttaccagttcaaaaagtttaattaaccagcagtcaccgcatctgaatttttgtctctggggcatagatggcagaccaagattaaaagtggtaactcagctatacgagcatgggctaccttcctgggctctcctgcagtcctgtagacctgctgttccgcagaccatgggacacaaggtcagtgtgttcccagtgagggtcccaagtcagtcatcttaagtgtttgttctctgccccattcagtggactgttgacttcagtccctgcaagtgctttagcccgagtggggttttctcagagcactgccacgagttaagtgtgtgtttagccaaataatttctccgtaagggaaaaatgcagtcacccaaattttaccaacaatgacagagatgagagtagaaaagattaggcaacatctgagttttaacttgaaaagtgtccaagtcatcatgaaaggccgactgggagcaagtgattattagagattcttcaggagacctcatctgaaaatgttaagactgccagtgagggaaggaattgttaaaatgccagcggcttttttttcctctttttttctgtaattctgtaaaaatgcagagaaagttgagtggtacttcagaattgagggagagggttaccgcagagtagaaatatatttctagatttcagttccacaccacaaatccacaacaatgccatttttcaactgtacaaaaatctgcttatgaactggacatgatcttaatggtagtgtcaaaggccaagtttttcacctgttaatatttttccacatttgtccttgaatctgaataactttatacagtactgtaaatttaacttacatcgagtttgttgtcaattcttatgaaaagagctttctgcatgtaacacatacggttaaagaacacagcaaaggacaaaatttgcaggaacagttttggaaccaacagaaaatgtcaccttttatttgccatcttatatatatctatcagttttaccagctacttctaaatttgtacattatttgtaagggaaagaaggaaaaccctaagacttgtctaacttagtggagaatgtgtgtgttgggcttaggatggatagctaagtcttattgagctgtgttacctaacttgtatataaaaattgtaattaaaagtttgggttcacctgtttctcacagtttaaaatgatgagtaattgcaaactctggaaatgtgactagtatatgatttaaggctgtagaagcaaggaagctctttcaagtgctaaaactaaagacttctagtttttggctcaaataagtactgtttgtataccaggatatgtgagatgtaaatgtagtaggtcacttttcacccttgtagctataaaataaaaattttgtagaacagaaatagcttgtactactgaattaacaaaagttatactaaagtatcatgtttaaaaaaaatatatatatatatacagagttaagcttgttgctgttaccctgtctggatttgaaaagtgtgctgatttatatatatatattacacacacacacacacacacacacacacacacacacacacacacacacacacacacacacacacacacacacatacacctaaaatggcctaaagcagacatccatgtaattacagttgcaaaatgaaaacattttggaaagaacattgtatcatagttcattcatttgcagtggatctttgttcctttttactgtggtaattttagaaatgagtgtcaagtttgaaattagatctgctaagttggggttttgctgcttgaactctgcactgggtcctcaaataaaccgatgtgaatgtagttttttccccctgtgtgaagaagcagttacaccccaacaataggaggaaaaatctagaactatttcaagttttatctttttgtatatgaaaataaaataataataaaacaatcttgtctttcttaattacgtggcaggggattggagtttcctttcatgaggattagacatgaaatgaaatggcgttcggctgcttagagggctgactcaagtcagttcctgtttggtatgtgtaacattaacagatgttaatggctgaatgcctagtctgccatggtcctgtggggctggagctaagcacaggtctccatttctgccattcagaagtccagggtctagttggggacattatgaatggggaccattctcctgaacgaactgttctgggattttgagtaagtttctgcaggttagcatattttccaaatgtccaagacactccccattccctcatcctctgccaccagtcctgtactttgcagacaaccctgagcaatattgttgtaagtggagcagagaagccttgaaaatagttgtattcaggactattgcagatgacaaactctgtcattcccaaacgttgctgagtactggagtcatttgcggagctattaaaaaatacaattatgggtccttatccccaacctggaattagcaaaccaggtctccagtttcagagatttggacttaatctcactaaaggaactcatggttccccaataataaaataatgatagtctttaatacctaacaaaacaggaaggccccagaaatcacctcactgctttctgcagtaacaagtttttttggtcgatgactctttcttgcctaagtggagaaacaccctttaaattcaccctttattatgagaattaagcaacggtttgaaacttgtggagaaagtttttgatgaccctttattcagggaccagttgcccaatatttggctgtttttgctctttcacgtttagaaagttcaccttttattagtgagtgcctctaatgaaggaaggagagcaaagggctgacatttttgatacaggatcttggagctggaaaagctgaaaggttggaccttaggagtcatctggtcaaactttccctatagcaaaggaattctttgaccaaagaaatttgacacagaagttggtttataaaaccaggcttgtctgaatgagcaagtagaagagggccaagggaccatttcacttaccctcccatcccttcctttaagtctcaggtatccctatggaacacctaggaaccttgattaaagtttacaaatcactggcccaattccaattttacaggtgggcaaacaggcccagagggagttttcctaccctgaggcaggcaacccttccagttcttgacctcttgggaccaaaagtggggttacacttgttcagaagtagaggatctggattaggaaaagccatctaatatttatctctctagtatttagcacagtgtctggcacttacaagggccttaagaaatacagtacctcagtgattgtgtatttagtaaattctggggaaagctgctgaagtagccttgaagcctacagataccagtgttgtctggttgtatttgttaggattcttggttgcaggtgacagaagccattagacaaaaaagggggtttcactgaaaggattctgggggaaatgactagccaagacttcagaaaggcaggatgtatgtgggcttcaggagcctgtgggagttggggtcataacattgcaggcctccacctgtgtcctggtatttcttccattattgctcagagcaagaccagatgcatctgctcctttgacttcttagcaggaaacaaggctgtagacagtgccagagcttttttttttttttttagacagagtcttgctctattgcccagattggagtgcagtggcacgatctcagctcactgcaacctccgtctcctgggttcaagcaattctgcctcagcctttcgagtagctgggattacaggcacgcgccaccacacctggttgatttttgtattgttagtagagacggggtttcaccatgttggccaggctggtctcaaattcctgacctcaggtgatcctccagtcttggcctcccgaagtgctgggattgcaggcatgagccactgcgcctgtgagttttacgtcacagctttgctacccagagagactactagatcgaaaatccctaggaaggactctggttgatgtagcttaaccagtcagggtccttcagaagaggtattcctggcaagggggtagcctcccatttgaggctgtcaaaataatgtgcacacttcagtaggttgttagaagtggcctcctggtcagtgaatcatcagtgggatcagatgaaagttattcctaccagttatctaagaaataggaaacttgaagtttctgctaagaactaagtccacacggaatgctagagatcatgctgcaaaatgaagactcatttgtttgtgagtggtagtccatgaaatctatcctttctttgccagcaggcgttcagcaatctggattttatattctatcaagacaaagagtagagatgactcaaacatttctaacatttatagagcacttagtgacatgcccctggtacttccctaaacattttacatgtgtcatctcctttaatcctcacaagaacgctatggtctaagtattattattccaatttaaaagagaaggttggggacagtgacacacacctggacttacagcactttgggaggccgaggcgggaagattgcttgaggccagaagttggataccagcctgggcaacataaggagacccccttctttaccgctcccccactcccgccaaaaatttagccgggcaatgtggcacgtgcctgtagtcccagctactcaggaggctgaggcaggaggatcgcttgagcccacgagttcgagatcgcagtaagctatgatcattccactgtactgcagcctgggtaacagagaccctgtcgctaaataaataaatagacctgagttggaatatcggctctggagaccttagtgtaaccatgcgcaagtgtttactcacctattaaatgagactaaaggtattttcttctcatgactatatatagcataccactaagccctctagacatcatattccccatccatcgccccgtccagtggaccagggatgaagcggggatgcgctaggcatcccggtttgtcaccagggggcgtgcgaggccctcagcttggcgggcggtgaggcgtggggtgacggggggatggcgggggccggcatgcgcgcgcatgcgccgtggtaaaaggccggtacctcgggcaagatggctatcaagagtatcgcttcccgcctccggggttcccgtcgttttctgagcggcttcgtggctggggctgtagtgggcgctgcgggagctgggctcgcggccctgcagttcttccggagtcagggcgctgagggagcgttgacagggaagcagccggatggtaagtctgtgggcccgtcctcccttcgctggcccagatttcgggctccgactcctacctggagtgtgaatggcagtccttgacggacagccttcaccgtttgctgggcccctagcctggcccttggtttctgacctttattctcccggctcggcctcccttccccacctcgcgtctcgccagcttccctcatgtccttccttcccccgggcatcttcgttttctgcacagaaccacccccgccgcccgactttcttccccccagttactcatcgcgatatctatgttttaatgtctgtgttctctactaagattgttagctccataagacttgagactatgtctgttttggtctccatcatctaaccagcacagtacctggtacataattggcattcagtaagtatgaatgaaggaataaattaatacataattttagtagatgagttaactgcccttctttcgtcattgttcagttgaagaatacctgctatccctccaaagtgtataaaaactcatgttgcaatgggtaccttatatttgacaaaaaaaaaaaaaaaattaacacgagctcatttcttgtactttgcggatgtgctaatttaacttgctcctttggatacttggcatctagcaagagaactacccccttggggggttgaggatttgagaaggcatcggggaggattatctcgaaactgactcactgctgaatgtgtgcttggtttctcccactaggaaaaacagtaccagttttactgtcatcttgcaacagcacacatatcagtgcttcagagatgatttggaaatttgatgtgaaagactaataagatcaagtctttattcaaaagttaatgcagtagctgcattttattcactgattataggcaaatcagtactttgcctactgtctgttttcttcatctcataagtaattgcaaaaatgagattttctggttgattagacttctgagccagtcctttgtaaatcacaccgctctccttttccttataatctttcattattaagagccactaattgtgtgtgtgtgttttttttgtctctgccccccctttttttttttttttcatttttaggatctgcagaaaaggctgtcttggaacaatttggattccctttaactggaacagaggcaaggtgttacactaatcacgctttgtcttatgatcaggcaaagcgggtgcctagatgggttcttgaacatatttccaaaagcaagataatgggtaggtggttggataaaaaaactgaagtaacagtatttatgaaagatgtctccaaatttaaaacagggatgattattaatattctcaacctttttcatatcatagcacatgtagaaaattatatttatataacttactggttaaatcaaccctgcctggcagccagaaagccagaccctttccagctgtctcagggctgaaaatacccatatcttgacacactagttgggaggctctgtcataaatattacagcaatgagcaccattcagttttaccttaacaaatatttatgtgcctgctatgtgtctggcactgtggtaacccttggggacctatgtgtgaccagagtagaggatctctaccccagtgacactttgagttgggagagtgggttgacccatcaaacaaataattttagatgtataattacaataatttttccaaaggaggtgattgcaagttagtgtagtataattaaggaacagtaaaaagtttgatgagaggctgggcgtggtggctcacacctgtaatcccagtactttgggaggctgaggcgtttgagctcaggagtttgagatgagcctggccaacatggcaaaaccgcgtttctacaaaaaatacaaaaattagctgggcgtggtggtgcacctctgtggttccagctacttgggggactgagatgggaggatctcttgagcccaggaggtgggggttgcagtgagccaagatcgcagcaccacactccagcttaggcaacagagggagaatgtgtctcaaaaaaaaaaaaaagtgtgatgagagattataacacaagaacctgattttgattagtaaggcttctctggaaaagtggactgaagagtgaacggaaattacttaggcaaggggttgaatgtgccatgggatatggagaagagcattctaggaagaaaggaacatttgcatcttcggaggcccccaatgtggacaggagttttgttcttttagggaactaaaagagtgccagtagatgaatgagggggaaggtgatgtgaaatgatgctggagaagtaagcaggtgtgtcagtttattcatgtgtccttatgtcttgatagggtcctgtagaattgccagatcttgataattaatgtcaaattggtttctaggtagattcttcaagtttacactcctagcatcattgtttcttctctctctcaaccttcacctatggtgagcattactgagctttaccaatttaatgctcattttacttgtgtttattgattatcaatgagggttaacatgctgtgaattagtcttttttggtaagttattctttacctatttcagttggggtattctcttttgaatttatttgtaaaagttcttttatttattaaggatattaccttttgtcacagttgttttgttcccttttgttatttgctttttaatttgctgtgtgttccacatattctcctttgctttaaaatgtgtgctatggctatgcatattaaaatgctgatattaaagttagtgtgtgccattctagagtgcacagcaaccagcagaataacaggaggcttggaatgtacttggtgttagacagaaactgatgtaagtgaaaactttatcaagcatataagaaaacctgggcattttatattgtataataagtcttgtgagctgtgtacttttgaggcaataaaatagagccaattaatattatttgaaaatagggagcaatgtacctgtgttttacttgattttaatgtaaaaggtcttctgttttcagtaatgatggactgagttattcagatagaatcttcctgctgaaacagaaaatgttagtatataaaaagtgtatatctgtattttttttacctttttttttgagatggatttttgctatgttgcctaggctggtcttgaatttctgggttcaagtgaccctcctgcctcagcctcctgagtagctgggattacaggtatgtgccactatgcccaactaaaagtatatcttttaaaaaatggcttaagaaaaatgaagagccagcagcatagtggcgaattgctaggttagtgttggtgggagaaagcgagaatccaaagaggtaagcgcagtcttggcaaaccaaaaccacatttgcctttgaattcacagcattatggggtgaggaggattgaaggaaagacctaagactcacccaaggtagattgtcctgtaggtcttgcagtgtaggagacccttcctgtgttaccctggaactccaaagggctacatcctcagggaagagtgaactagaactaacttccctgcccactcttagggactacatggaaggttgtcttggcactgaacggagaaaggtcaaaaggaagataaaaagtttgttccagagaaggtaaagtcaaaaactggctatcatgcagacttacagcccaaatctgtgcatcgagaggagatcagggaaccttaatccctgagcatggtttaatacggttctccactgggaatactgctagacaccttacagcagtaaatttatatcttttctcaaggaaggtatctttttaggtctttggaaattcctacaaattgcttttccagggcagtaagcaccagccaaagataactagctgtagaaggaagtgattccaatggtaatgacacttagaaatttactaatgataaatttttctgtattattctttataaagtgattctaaaaagctacatatatgatactttactgtaaactttgggatctgatactaaatttttcttggctgaatgaaatcaccttggaatcagtgacttcattgttctccattttacacttctttgaataacagtctgagtatgtttcatttgttgtcataacttttgtagtttaagaaagtctcacctcacgatagtgcaataggtagtgttaggatttgctaatgttctctgtgacaaaccattctggaggtgtcagaaaataaataaaatctgagatttcttctctcctatgtggtacccagatattctgttttagaaatttctgggtggagctcataacttaaatgtttattttgtcatggttcgagaggcagtaagcaagatatcagagacactcctctccccaaggctgtgcttgcctagaacaaattgttttgtgtctatatatatccattatttcagtacacataaacttgtcaaatacaatcgtacaaaatacaatacatgggagtcttttttaaaaaacaagagtttatttagtagccaagctttttatatagtttagtgttttgattggtgattgtttttacttaaaatactattcagaggagtttttctttaactggaaaggccagagtcaaaattatatgagatagctacactgtatgaaaagcattctttcctagactagtactttctaaattcagatgaagtatctgaactatcccaggaacttgagacatgcatgcaatccctaatactagctgcttggagagacaccagccagtagcaaccagcttgccttgcttagagaatcttgagggacatttgtctactgataacatatccattttgtgtgtttttcttcaggtgatgcagacagaaagcattgtaaatttaagcctgatcccaatatccctccaaccttcagtgccttcaatgaagattatgttggaagtgggtggtcacgaggacacatggctccagcaggaaataacaaattttcaagtgtaggcatactttgggggagggatgggaatatggggctgatgttatgcatacaacaggaattagaggtttaaaaacctaggagccaaaccttaaaacttgagaatttccatactcttatttttcttcctgacaatatgtctcttctttcaatcacataccgagacatttttaaacaggttgaatgaggaaaactaagtgctatgtgaagggaactagaaagccactgggagctgaagctactcacttttatttatttatttttttgagacggagtctcactcactctgttgcccaggtcggagcacagtggcttgatctcggcgcactgcaacctctgcctcccaggttcaagcaattcctgtgcctcagcctcttgagtggctgggattacaggggtgcgtcaccatgctcagctaatttttgtttgtttgtttatttattttttgagatggagtctctctctgtcacccaggctggagtacaatggcacgatcttggctcactgtaacctccgcctcccgggttcaagtgattctcctgcctcagcctcccgagtagctgggattacaggttcccgccaccacacccaggtgttttgtatttttagtagagatggggtttcaccacgttggccaggctggtctcaaactcctgacctcaggtgatccacctgcctcggcctcccaaagtgctgggattacaggcgtgagccactgtgctcagccactcacttatttttaattagttaattagagacagagtctcgctttgatgcccaggctggagtacagtggtggaatcatagcttactgtagtcttgaactcctaggcttatacggtcctctttcctcagcttcccgactaactaggactatagtcatgtttcatcatgcctggctaatttattttaaaaaatttttttaatttgtagaaatttatagaaaaggtgaaaaaatagtacaacaaacattgatacatttactttacatatacatatgtaaattctgcaaccattgacaaagttgcagacatgttttatttctaaatggattgctcaggagtatgcatcatctaagaatgaggatgtttatatatatgagtatatataaatacaagtatcacaccaagaagtgtatactaatacatttttatatatttgtgcagtaatattatctaaaatacaatgtatagtcagctttcccacatggtcctaattatgacctttatagcttttttgattcagtattcaatcatgaatcacacattacatttagttatcatatttctttagtcttctttaatctagaatgatttccctgccaaaaagtgggaggagtgtctttcatgatattgacaattgttgcgtaaactattggtgattatgtcattaagatagtaattctcaaccttggacactcattataatcacctggagaagtttttgcagtcctgatgcccagacctgaacctcatacttacaaaactggaaactctcagggatgagacccaggcatcaatatcaatatttttaaagctccctagattattccaatgtgcacccaagattgagagcgactgcttgaagagaaggtacttgtagcattggcagttagtatagatcagtgaggaaattacagtgaggtagagccttgtatatttgggtgaaaaatgtgaagtgaatgaacacatagtggccagatattcagaagaacaaggacgttttctctgccacttttgaactagtatgtttgtactgtactaaaataacttttgtgaaaattgatctctattgagaaactctttgccagaggcttaaaaccagaatttgcccttaagctttgtgttggaaatatttagttcttagaattcacgttataggtttggattttataattgataagcctacctgactacttactttatagtcctcattttgaataattattataagagctttctgtcctggaataattatggctttcatttattgaaacaagtagtcaataattgcctagcactaatgtttaaataagaaagtgtttttctgtgtctttttaataaaatatcttttaaaggggaaagcatttcagtgcaagttactatgtttctttctttacagaaagccatggctgaaaccttttacctttctaacattgtgcctcaggattttgataataattctggatattggaacaggtgagggatgagagttttaaaaacatgattctatggaagataaatgaagtgacaggagaatgtactgatgtgcctattagctgtttctgtctttgtttttcaaaagctaagcctctgaaggtaagtatgttgggccagttttctttgctgtgttttgggagtacagccttctacagaagatcagacttcaaaacgtagcctgcctttttgatcatgtttgccactgttcaaaagtcaagttttgaaagaaatgactcaaaataataatcttaataattgaggcagcatcttttttgagtgtgttcagtgaacactattattttctcttgtattccaatatttcttagctttttttaaaaaaacagttttgtatttcaagagctcctgagctttaggccagggtcagtggttcatgtctatagtctcagcacctggagaggccgaggcaggagaattgcttgaggccagcagtttgagactggcctgggacatagtgaagccttgtctctactaaaaatttaaaaaattaaccaagtgtggtggtccatgcctgtatcccagctactcaggaggctgaggtgggagaatcacttgagcccaggagtttgaggctatagtgagcggtgattgtgccactgcactccagtctggacaacagagcaagaccctatctcaaaaaaaaaagttcctgaacttaaaaaaagttggggtatagtttaatgtaactattaaccagtttttttgtttgttttttgtttttttgagacaaagtctcacactgtcgcccgggctggtgtgcagtggcacaatctcggctcactacaacctccgcctcccgggttcaagcgattctcctgcctcagcctcccgagtagctgggattataggcacacgccaccacacccggctaatttttgtatttttagtagacatggggtttcactatgttggccaggctagtcttgaactcctgacctcgtgatttgcccaccttggcctcccaaagtgctgggattacagacatgagccaccacgcacggccactattaaccagtttttgatagaacctaactataaaataatctgggccttctacatttttctgacactgtcaggtggcttctttatgcatctaaaactaacggtttgaggttctttcaggctattgtgtttttccccatatagtactttgtggtttaaaataatgaagagagcaccctgcaccaatgagagacttcagcagttatcagtcatggcgacatttgtttcatctacataccctcactttgccccactcagattatttttagcagattgcagatattttatccataaatgtttcgttacatatatttagaagataaggattcttttaaaatataaccacagtattattaatgcccttaaagaatttaacaataattctttattaccaattttatagtcagtgttcaaattttcctggttgtctttaattttttgttgttgttggttggtttgaaccaggattcaaataagatagacacaaaaatttggttgatatgtctctttagttcctataaatctgtagattttcctttctttttttttttcctccattcagattatctgttgaagatctaggatgtttgtcctagagtttcctttccatattctggatttgctgatcgcatacctgtggaagcatttaacattttcttttcccaagagataaatttctgggaggaaaactttaccttgtaattggacatatatatacaccctattaaaaataatttaaaaaaatttttaaggccagtcaagtgaagcagtgggagtagagaaggaacaaagaagtatgtaactggttgtgaacaattagttgtaaacaccactgcacttataccagcctataaaaataattggattttactttttagataagaaactgaggaatgaggacatgcattgttatctctcatttagaaatctcttccaactgggccgggtgcagtggctcatgcctgtaatgccagcactttgggaagccgaggtgggcagatcgcttgaggtcaggagttggagaccagtctgggcaacgtggcaaaactgtctattttagtagacactaaaaataaaaaaaaaattagccgagtgtggtggcacacacctaaaatcccagctactcgggaggctgaggcaggagaatcgcttaaacccaggagatggaggttgcagtgagctgagcctgggtgacagagtgagtgagactccgtctcaaaagaaaaaaaaaaaaaacttccaactgcagtcatatacatactttcatatgtatatgaaagtacatattacaactacttgccatttgggcacctgtaatcccagctactcgggaggttgaggcaggagaatcacttgaacccgggaggcagaggttgcagtgagctgagattgcaccattgcactgcagcctgggtgacagagtgagactccatctaaaaaaaagaaaaaaaaaatacttgccatttttatctggtaagttgacaaaaacagattttaaatgataaatcccagcattataaagattgttgtgaaactgctgtgttgtattttaattttttagagtaaattgatataaccctattaaaagcttatagagtaaattgatataaccctattaaaaatgttagttttacatatgatgacgagtctttaaaataaattcattcagtaattctggtccttgaaatttatcctaaggaattgatacaacgttgcattatataagaaatgttaacataagcccaattgtcctgcaagaggaatggttaaataaagtatatcatcttgttggaatgatacataattcttgaaagctggttgggaactatggcataaaaaaagttttaagttcatgaaatttgaattccagaatgtactctgagcgcacataaagaaaaatgtagatagttttgttagtgtatgtgatttttaagttttttctgtgcagtaagcaaactgggaaaataattgtttatatgcttataatgttttgtgccatgttcttgtttaatttctcaaatgcagtttttcttggtatctttcataggaattgatatgatttgctgctgtcttacatgtatatatgtgagaatatcatacatttttttatttgtttttcagaatagaaatgtactgtcgagagctgacagaaaggtttgaagatgtttgggtggtatctgggcctttgaccttacctcagactagaggcgatggaaagaaaatagttagttaccaggtaaggatgtttaatagtcaggtttatgttatctgtatgagattataatctcactttccattctgctttttatttttatttttatcattcaaaaaaaattttgcattctactttttaatttcacttattcaacaatatttattgaacacctattaggaatgataggcatagggaatatagtgatggataaaagcaactattgacttcaaggaactcacggtttagagtggaaaacagatgttaacaattaattacattaaagtgtgacatgctgtaatagaggtaaacacacacagtgtggtcttgtgaaaggactgatgggctctactcatatgagtcaggaacgcttaaaagaggaagtgatattgagctataccttgacagataagagtcaggagtggaccctgaggattccagaggatggagcaggatgagcacaggacatttgtggtcaacatcagggttttgagatttatatatcattcataaaaattggagcttatggtacaaaacagtgtgggtggctcaaggggtatgaagagttccataacaacaggtggacgggtgagataatatgcgactttctattctatgatgaagacttgggttttaatttttaggcactaagaagtcatagatttgttttaagcgtgggagaaatatgatatttgggttttataaagagtattttggcagcagcgtgtaaagagataggtgggaaaagggagcatttgaagaagagattagaggcaaggagatgagttaggacatacaagcagttggagtgaggaataatagaggaacacaggaaagagtaaccatgaataaataacttgtttgagtgaggaagagggagaagttccaggataacaactagattgcagaccaggctcagtggctcatgcctgtaatcccagcactttgggaggccgaggcaggcgatcacgaggtcaggagttcgagaccagcctggccaatatggtgaaaccccgtctctgctaaaaatacaaaaattatctgggtgtggtggcgtgtgcctgtagtcccagctacttgggagtctgaggcagaagaatcgcttgaacccaggaggcggaggttgcactgagccgagatcgcaccactgcactccagcctgggcgacagagcaagactccacctcgaaaaaaataaaaataaaaataaaataaaaacaaccagattacagtgttacagtgagttgaataaatgggaagaaaagcttttcttctagaagcttcttttttttaatatgcaagatatgtgagcacttttatagactgaaagagagattaaagataggagagtgtaattagtggtgtgagagcttcagacatctaatgttgctgggaaattcttagctagcctttcatattggcaatttacaaagtggtatacctgaagagcaggtgttcttagaaaaagtttaacatttaatcttatcatgcagaaatatcctgaggattcttccaagagggtggctgaaatgttatactatactgtgaggcttacagagggcagggaacaggtggagtgaagcagaagaggtggtagagtgagtaaaaagaagcactgaaggacttgctaataaggccaaagaggaggggagggaacacctagctcagctctggaaataaagtagatatttaataaatgctggttaggtaaatgattacttaagtctgtgataaaatttaataacctgaggaacagattgaggaaccaccccccccccaaaaaaaaaccaaaacttttagagtatattctgtccatttgacttgcttattatcagcctgtctagatcagatgtgcagtaatgtccaagcatccaaggatttgtataggtccatatgaatagcccactttctctttttccacacaaaattatgacccaactacttctttttgttaagtggaaatgatagagtagttgttttcaaggatttgtacatccttggaaaattccagtagatatgggagtgaaggaagtcaaaggaattagtattttaaaattaattcatttaatatctctcctcccatattaatttctctcctctgattaacttgctaatttaattttagtatattttatagtcttaggagaaaaaaaggcttaaagccccctgtattatttttcaaatattaattattcttggtctttgttaaatcctgtttattttatgtcagaaaagaggctcttctagctttgacttgtatatcttaaatggttaaattacagttttatttgtgctttgtttttataaaattgaaaaatttatatcactagcctactgtgtagtagaacaaaaatttgtacaatgtttaaaacgaaaaattaaccaataattacaagcatttcactacatagatttttgtgtggctatttctgtaaaatatgtgttgcccaaatgccgtagtggaaaatgtattgtttttcttaagttggatataatttttaaaaatagaactgataaaaatatatcttctagttgtttctgctgaaaaggcccagaagaattggtatgtcattagcaatgaacacatcttgagacccagatatttgtttctaaaaagcatctcctgaaaagactcagcgcttagagaaatgactgatttaaggggtggtacagggagagtacaaaatggaacatcatatatcagaaagccaaggaagtgctcagacaaatggtggggatatgtcagaaggacatgtgaatcagcttgaaggagctcccacttactgtatctggtgctattgaatatcaaaataaaatggattataaacctattgaattaaataagaatacatactcaataaatatgtaaatacatagggtgtaaagaaaagcttctgcataccatagaatgtcagttaataaatttgcgagaatgaaagagttatacaaatcattttgcacacatcaccataattgattcaggcaagagtcatcactagctaaaactagtgagtgaatgttttatgaggaatagggtatttacataatctaaaagtatctcctcatacattatttattaatcacaaagtaagaaataactttacagtgaagaaacatcccattacccaagtgatcaagtttagtattgctagtaatgggacttagtgaaacgctgtactcctggtgtgatgcactgagcaggataaaatatcaggcataccccaattgagagacattctgtgaaacagctgacttctactttacaaaagtgttagtgtcataaaagacaaaggctgagaaactatctgttccagattaatagattaaagagtcatgcaaacaaaatgtgtagtatgatcttagattagatcctagaccagaaaaaagttgctaaaaaggatgttattgggagaattggcaacattcgaggtctgttatctaatatacaaattagataattgtgtattttcagtattaaatttcctgatttttaaaattgttctgtgatatgtaagtaaatatctttgctcttaggaagtcatatcctgaagtgtttaggagtaaaatggtgtgcctgtgacttttaaaaagtttagggaaaagagaagagagtgataaagcaaatagaacaaaatgttaacaattggtaaatctgagtgaaggatataaaggaaggagttctttgtgctgttcttacaaatgctaagcttttaattaattcagaattttaaaattatatattaaatattatatagatatttaaataaaatattaaaagatatattaaaatagtttatcagtgaaatgatactcaaacatgttcaagctagccttaaagagtttcaaaagagacctatcagctctcctcaccctagttagtgtcataatgatcagtcatgtgaggtcagtcaagatcagcttcctgaagagtatactttgagtaatagtcttgtttcttgtttttattttaaagacttgctggtcttaggtattctctttcagattctgggcttctaaggtcatatcattagttttccatgtctcttattaatttataggacctatgcatgttcacactggcaaatctttaattcagtaagtcatccgttcagcaaattttcaagtacctgtcatgtgggaggaaggtatacagaattgtaaatggcatgctccaaacttatattcttgattactttcttcctctcctgtatttcacatcctggcagtcatctctcactcttaattactttgaaccaacaacttttattaattctctttttttaaaataacttttacttagacataccgaagctctgaacacctgcagtattgcagaggcctctaatgggtttctctgcctccaattgcgttggctaccagtctatctggagtacagaaaccatgacagagaaagtatacgttgttactttcctaatcctcggaaccataaaaaaaggaataacattaaaagaacagaaaaggaaacttcatttatactgaaattagggaatgttcacagtcctgtatcaaggaatttttcaaataatatctgcaagataaagtgaaatttggaccaaattataaaggatgttaatttgacatgtctcctcttatcaaagcatgggacagggtactagaattagtaaggaagttcagacctaccggtagtagaccacaggagaaatttctggtgtttaacttggagcttatccctttatcttgcaatagtaggaaaggcagggtggttatagttgttaaaagcacatatttcatgtcagatctggccttggatctttgctttgatacttacttgcatgtggtcctgggaaaatgacctaacttctttaaagttcagttttatctgtgatatttggatagtagtagtgtttacctcaccgagttgctagtatcatcgttagcttggtagttagcacataggaaatgttcagtaaatattagctactattactcctttggaggctaacataagaatgaagaccagtgttttttgtattctttggtgcatgtactcataaacctatgatttctaagattcttttttacttctcctttcttatctacagaagcccaaaagtcaggtgcctctttattaattttaaagcacaatttttgtagtcttctaagtcgatgcttttgagttcatgagttcatgttatgttaggagttgtgaaattagatacttacattaaacacggtttagtcttgatgcttttttttcgctcatggcattaaagtcataactggcaaactatctttccttgaaattaaacttgaaaaatttttaaattatgcaattatatgtgcataatgataaaaatgctaaatcttaaaacatgattgtggaaatatatgacattgtaatgaaattcaaacagtacaaagcagcatgaaaaggtaaagtctcacttatactccttatcccactgtccagtttttatttgttttggcacttatttctatatctcagaataatgagcactaaaatatatttttaacttgtgacctgtcgcttattaacagttactttatctctataaaattatgaaatttattgtttatttcttgcactgcactatactctgctagtcatatatacttaattttagttcttccgttggtaaactttgcatcatatactttacataatatacttgaacctctaatcttgatctaccatttatacttgtcaaggtttgtagcatttacatttatgtttgctaacgataatgtagtctgagttttgcctgtagcagagtttgtaaactgaggcctcttatggcaagtccagcccatagaggtattttatttggctcacatggtatatatatatatatttttaagtttttcatagagatagggtcttgctctgtctgctaggctggagtgcagtgacaagatcgtagctcactgtaacctttatcttctgggctttcgagatcttcccacttcagcctaccaagtagctacgactacaggcatgcaccaccatgcccagctaatttttaagtttcttttttgtagaggtgggggtctcactatgttgccccagctggccttaaattcctggcctcaagtagtcctcccacctccacccctcaaagggctggaattaaaggcgtgagccaccacacctgactgtatgttattttttaattagtttataatgtttaataattgggagatttcacataaatccagattttagcttctcttaaatcagatgactccgtaacaattggcatatactcccataggcagccagtttactagacaagagtatcaaccttctccttagattgaacacacatcttcaaatcactgtagtctttacctgccccattttactcacttacatttcctgtctagcccttgttggtctttgagtttgtaatccaagatctattagaaaatatttaaccagcatttatattattataagtgtgtatgtagtatgtttggacctataaggaaatagatataattctatatcattaaatctgtgccacttgagagagaaatattaccacaaacaacggaaaaacagaagtggaaggtaagggtggcagtgtattataattgctctttttaaaaatactttctaattcagataatttaggtcatttaagcatattatcatatgattttttaaaaaggtaaattagttttttcgtgaaaatatattcttggagccctctgactttctgttttaatttggattacttgtttcctccctccttccctttctccttcattccctttcttctttccttccttttattcaacagagacttaactaagcttttactaggtacctggtgctgttctgggtgcttctgatacagcattaaacaaggcagaaaagagtaccctcatggagcatgcattatagtggaggagatacctagtaagtaaaatgcctcgtagaaatataaagcacggtagaggattgtattagggtgggaaagaaagacaaggggaagtgagatagggcagaagcctaagtgaagtgagggagcaagccatatgaacagtttttcggctagagcgagtgcaagacacgggtgaaactgaggttggcacattcaaggagcagtgctctgctcagtgtgactagagcagcgtaagcatgaggaggagaagaaggtaaattatagagggaggcaatggcaggaaatgtggattgtattaagtgagatgggacacttaaacagtgttttgatcaggttagtagcataatctggtttacatttttaaagcacacactggcttcttgtgaagaacagaagaaagtgtggaacctggaaggccagttaagagactaatggaattgtctacatgagaaataataacttgaataggatggtggtggtagaaatggtgagaagtggtatgatttaagatgtgcttggaagtggtcagcacactgatgatgttgaaagctatgatgagattatataagtgaatatagacaggagagaacaatcaattgaattctgaaccctggagcacttggacattagcggtcaggaagaagaagatccagcgaaagagtcagaggagcagcctttaaggtaggagaaatctaggggagagtgatgttccagaagctaagtgaagaaatcatttaaaggagggaatgatgagttgagaactgactgtttgcaatcccagtaagcttttttagttttaagtcatctatatatctgtccttctgtttctccttattatactcctagcttgggtccttaaattcctctttccccttaaatattatcttaaatccctcttttccaccctcccccccctccccctgcttttttttttgagacggagttttacggtgtcccccaggctggagtgcagtggtgcgatcttggctcaccgcagcctccacctcccaggttcaagcaattcttctgcctcagcctcctgaatagctggtattacaggcacctgccaccacatttggctaattttttatatttttagtagagacagggtttcaccatgttggccaggctggtcttgaactcctgactgcaagtgatccgcctgccttagcctcccaaagtgctgggattacaggcatgagtcactgcacctggctacccttttttatagataacttttttttgctttggtagagtatatcctcaaattttttctggaagagtcaatggatgataacctttccgagtccttgcatgtctgaaaatgtcctaaaactctgaagatgcgctcaggaatctttatgtatgacaagttctctagagtagttttatgtataccaccattttattttattttaatgaggatgatccctttatttgacttgaggatggagaagaagaggattatgaggtcacgggaatgtctcatgaggaattacccaaagctggtaacaccaggtgctctgccaggaggactctctggaaggggcagccagctcacagatgccctggatccctcgaggccagtcactaaaaagttatgaccatccccttcttgccagtctgccagggctccaggggggaaaagtggaaaattatctggtcctggcccagggccagctcctcggtgaggaactcgaagaagtgggtgctgtggctgcggttctcctcagtggtgtccatcatgctggtggaggagatgaacagctgcgcccagggctcagtggacctactcagcaccatggtcaggcccgctacacccatcatgttcacatgctgcccttgttctgtgctccctggcccatgctcccatccttgggtttgcccaggatggaggctgtggcgcagagccatttctccaaccctgcaggcacttggttggcaggcaagttcgtgtctagctctaggaagggcatgggctgtagaaaaagagacccattcttttagagagtatttttctagcctcatatgaaggcaaaacaaaggcctgctacttttgtgagttgtaggataattctgcagatgaatttttttcagtcacacactttgattttgataccctttatttgctagagtactacttaaggggtggtaaaaatattaatatcagctttggctttttcctgtatattttatcttaacaatgtcatcacatccatctttcatcttccagaagttcacggtagttcttagtccagtaatgcagtactctgtcatttttcagcacttttatacctttttactgccattccatatatttatgtggaatatatatatggatatccatatatatatatatgtattttccttttaatttgcagaggagaggaccaaaaacccgtgttcaatttgccttttttaactggaaaccctactttaatctatatttattagtgttttgcaaagcaggttaatttgtttttgtctttgcttttagcaggttaatatttcttaatgttttatttggaaataatttcaaatttatagaaaggttataagaacaataaaaagaacttccctgtatctttcacctagatttactggttgttaacattttgccacatttatgctcccccatatagataggcatacacctgtttttgttttctgaaccatttgagttagttgcagatatcttgttcctttcctcctaagcattctgtcatgtaaccacagaataattatcaaattcgtgaaaaaacatatagaaatactacctaatatttagtccatattgaaattttacaaattacccaatactatcctttatactgttttttttttctgattcagtatccaaccaggattgagcattgcatttagttgtcatgtctctgtagtctcctttaatctgaactagcttctgactcagccttttgtcttgaatgactttgatatttttgaatagtacgggccagttgttttacagtatgtccctcctttgggtttgtctgttgtttgctcatgattcattatgtttttggcagaatgtaggagcagtgatcttgtgtccttctcagtgcattgcatcaggaggtgcataatatcagtttgtctgattattgatgattttaactttacttggttaaggtggtgtctaccaggttttttcaccatttccccctttggaatttataagtaatctgtggaaatactttgaggcgatgtaagcatctttttcgtcttcgaactttcactcaatagttttagcatccattgatatttcctgcctgaattagttattactatgttagttgctaaatgatgactttctaattcttactccttaatttattagttgacattccactgttagagcttttccttgttatcaatgtagactcacagatttatttttattcaaagagttttaatgtttactgtgattgttcattttgatgctcaaattgccccagatttagccagtgggagctccttccagtgtctcctgtgtccttttgatgcatcctcatcattttttagcatttcctactttctggtataaggctatgttccatgttcatcttggccatcggccatttctccaaggagcactggatccttttagtggggattgatgtttagaaaccaagatctggacagcaattcagattgattcttgagtgcttgctctgctgtttggtttgtcaggtgtgttcaccacatttatttttagccttttgtagtggatggagagagccccaaagctcgtagtatatggattccattgcctttagtggctcactgttgagaaggcctttctcctctgctttctgtgttcttgtatttcaaaacagggattgacagacactggtcattaggaaagcagttcactgtgtttgtacattgtgtatgtatatgtaaagttgaatattgacttcacgaatccatatttctggaggagcatatggtttttcagttttctcagaagcatatcaaactgacatctacttttatatatttatgtttttcactaacaaatatctccataataatactgcttttattagttttggcattatatttcaagtcaaactttatttcaggtagaattttaaacctaaaaatctttggtgtatctgttagatgaaagcaaaatatagtttgttagtaaaataaatttgaaaaattatcttgaaattcttgccaagaatttaattgggcccaaatttttatatatatgcacacacacatgtatctataaacttgggagaatttggttaagaaatagagatgtgggaggtctacctaggcaaggtgaagagatgagaagcgataggatatatgctgagaaaacagttaagttagagcgttcatgtagggaaggagacaaaaataaaaggaaagtttggggcctggtggcagaaacttcaaatgaccagctaaaaagtttaggcaagaacttcaagataattttctagcaagcagggcctttgaaaagtaggcaattaattataaaacaaatatagataaaatgatgtcctttaattattctgggaaaggggacacagcattgcccagtgctggagactggtctgtttctctcaagcaacgaataatttgaatcatgaattcccactttcaaggcaatgtcttgcaattacgtacggcaattcagagtgcttggaaagtgttttgttttctcagatctagccatttaatatttactgcttgcttacaactatactctgaaccttattttaggaagttgtacccaataaaagggtttatttagttttctgtccaggcaatgaagcatatatgtgtttttactttgggggaagtaaagcaaatgaactggcatttcttgagggccaggtataccaggcagtatgtaagtagctttatatatgcatctcattcaatcttcactacacccttacaaaaaaagtagtgaccattttcttttatagacaagaaaatcaaggctttaaggatcaagtctcaggcatatagcttataattgtcaaagagggtatccaaacatgggtctgtctgacaattgccagtcattcacagtgttactctttgaagcgctcaagtttatagtaaatgaattgctgtgctgttcatatacaaaagcttaaggttagcagataataaaagatggtgtggatggagagaggagttacaagtgatacttgctagcatgcaaaaataacagaaaatgggccaagaggaggattccttatagccaggcagaaatgtctgttagaatatgtaggaaaggatcacatcatcatagaacttgagtgaatatgagcctaagggaagattcgtagcagtgattttatcagaagtgagtcatctgacagttctaatcagaatcaccccctttattatatagctgaggtcatccctgtgctttctctgatgttcctgtttcaagaagaggttgattccagacaagtgaaacatacctgaagattctggtttggacattataaatggtctgacaagaaagtgagcttcagattttagaactcagtgatggtggtaatgttagaaatatttaacaatctgtgttcttttataacagcactttgcaaacttccattatactaaccctaaaggggaggaaattgaaaatgccctcaggagtcttgagacatcatttgaagtgatatgggagtaatatttttttttaagtctcttgctttatatttagggaaagcttttgttcatttccatatctatttgttttaatgaaagttaaattattttactggttgtctccctaccctcaccctaaattttcaagtaccattgacagcctagaaagagggtgcttgttttactgtgacttagtaggctgctaccctttggcctggaacaggtaccccagtgtgagaagtaccgtcttccagggtttgtgctgccacaaaagcatctgctgaggctctatagataacacagggggcgaccacattcttgttgactttaccacactttgtgactccctcacttttcatgttccttccccccctcaggttcggatttcctgtttatcaaactcccatggtttctttctttcacttgatcggcatgactttttaagggcgtggtctcttgatctgtccctctagttttatttttggagtttctttttttgtcttaccaggggaatgtaaccaaatatatctatctaattctagcaggtacatattttttcctcttgatgctgcttaatattttattggaggcacatttacagtatgtatgaccttacaaatggcaggcttaatatgggtattgtttgttttgggtctcttctgggtctgggtggcacaggtggtggtggcaaattgtcatttctgtctcttggatggaaggaaacaagctcaggccagtatataagaaaactagcttcaggttgcgaatgagtgccagcttatgtattgtattttctagttaactcccagttgacttccaatttttgctacagtcttgagtagagttcagtgcttcttgggaatttaatagcagcaagggtttcctttgcaaaatatttttatacctaaatcttacatgaaaagggttgtttgctgactcactgattaactagacttggtttatgttaagcctttgagtcctttgttacagacatcatttgtgcccaagttgctttctcctcctgaaaccccattgctgacctgtaactagtctaatcttgcttgattatacgtttcccccgcccccatccctctgtaaaaccatcttttgtaccaaatgccgttgtatcttttgaatgatgtccactacaaaatagctttttacatagatcttgtagattttgaaaaatttttaactaacatgtcattgtatcttcataacaattctatgagagaggcatttataaaatacaaaatagcaatccacccacggggatggctgttacgtattttgtaaatgaagaaacaagaaatgggtggacgcgacttgcagcttagtggcaaagccaggtttgaccaggtctctgggcttccagtccaccaaacctctagtagtgtttagaaacatttctggaagtctcccaatttttccaaaagtaggaaaaatttattatgtagattgagttgtctttaaagagacagctctaaaatattttacgattgatgttgttttaaaaaattgtcttaaattcaaggaagaaacggtgtgtttttctgaatacccaactaggacctgtccctatattagacagattaaagatgtttgcttcctaagaacaaagcagactgaatcagaaaagagattagtgagtggctaagtttttatttttctccttagttctagggatagtattttacccccttgaaatagtgtgagaaggtcatgggtagaaggatcacacctgtgattcctaataggaatttctgtttccatgaggtttctcaaaagtagaatcgaggtcctttagcaattgtaagagtttttaaacacctatagaaatggtacatttgcataaagtaaagctgtagaactgaaaatgtccaacgtctttacttttggctggaattttacgagcctgattagctctgcatggcagcaatgggcatgttaattatatttgaaaattgccgtttgtttgtagacaaggagtccatgaggagagaaaatcaagtgaatgttcttgaactgtactgcagtgatggggaatgtccacaaggtggcgcaaagactttgtttaactgctggattcctagctagcacctggaatacttgaagcccctttcaccttctccctctttgcaaactatggctcagctgcatctgtgccctcagttctggtccccagcttcccctgaatccccttcgtgctgttatttgggctttgtattggtacctaaccacattctacctgtagtgaaagctgaaggtcttggttcccactctaggtggtaagtttcttgagtggaggcaccagctgcatatactttaaagcatattcttttctgtatttccagcaatgccaggcacaggacctctgagttgcattgttgaattaacatcttttggttatttgtgagttaattgtggacttccatagggttctccctcagtatatttttggctttgaagagtatgtttatcttcccagctgcataaatgaatttttggggtgaaatggggattttatgtttgtagtacatagtttcatagactttacaccacaccccgaccaaccactttcagtaacttcgaagacagttggttatggaaatcattcccgtgcacgggtcttccctgaagctctgcaattggtcttggcagtgggaccttcatgtgtgacagacagcagatggccatggagttcccaggctgtgtgccatgtaggtaggagcttgaaaaaagcagaaaagaaacctcctttgtagctgtcgtgtctctgtcttatttgggctcacaagaaggaatcttgctgcaggcagagctgtctgatcaggaaagaaaactgactcttaccagggaagggcccgggaggggcagtaataccaatgagcatgttttagttggattatgtcagttattggggaccattaagtaaatagatgttgagtattttctttttcaaaaaagcctttttgttttgttttgttttgttttgagatggagtttcgctcttgttgcccaggctggagtgtagtgtcacaatctcggctaactgcaacctccacctcccgggttcaagtgattcttttgcctcagcctcccgagtagcagggattacaggcatgcgccaccacgcccagctaattttgtatttttagtagagatggggtttctccatgttggtcaggctggtctcaaactcccaacctcaggagatctgcctgccttggcctcccaaagtgctgggattacaggcatgagccaccacacctggcccagatgccaattggaaggaaatttgaaaaggtttagtaataatgttatttcattaatttcagccaaaccacacaactaatttatgttttctaggcctgaccctggctctggcttcttcattgtgtggatacctttccaaaatgtttgatatgacaacatatttagaagttctttgatcacaagcccaaggatgtgcaaaactcagagcaaacagcatttacatttatgtaatttaattttaaaaattagccctaattgaagtgatcctggagatggtaatgttgacttgacacctggctgcttctctaagggctatctgtttagttccctagtgaatttcataaactaaggccatgtttttatttctagagctgggagtacccaagcctgcagttttgacctttgaatgtttggagcaccagaagttctgattatgagatgaagagaaaatgacagcttttcttgtctattaaaaaaccaggactcactcatggcattcctttgtcctttgtcctacaaacagaacagagactgtgacccctgatctttgggttggcattattttatttttattttttgaggtggagtcttgctctgtcggccaggctggagtgcagtggtgcaatctcggctcactgcaccctctgcctcctgggttcaagcaattcttctgcttcagcctcccaagtagctgggattacaggcgcctgccaccacacccagctaatttttgtatttttttttagtagagatggggtttcaccatgttggccaggctggtcttgaactcctgacctcaagtgatctgcccgccttggcgtcccaaagtgctgggattacaggtatgagccaccgtgcctcacctggggttatattattttaaagaatgtgatcagaattgacctgttaaatactcttcttgtatgtgaatctctgagtcagtttattatttttggcagttgaatttaaattcattagaacagagtgggatggcttataagtacatttcagcaatgcattaaataagtatttttcagaaaaaatttgcgaactgttagcacaaattggcatcactaatatggctgctttgtttttaggtgattggcgaggacaacgtggcagtcccctcacacctttataaggtaatcctggcccgcagaagctcagtatctaccgaaccactggcgctaggggcctttgtggtacccaatgaagccatcggcttccagccccagttaactgaattccaagtgagcctccaggacctagagaagttgtcaggactggtgttttttcctcatttggatagaactagtgatatccggaatatctgctctgtggacacctgtaagctcctggatttccaggagttcaccttgtacttgagtacaagaaagattgaaggagcccgatcagtgctcagactggaaaagatcatggaaaacttgaagaatgcagagattgaaccagatgattactttatgagtcgctatgagaagaagctagaagaactcaaagctaaggagcagtcaggaacccagataagaaagccatcctagtttttatctcaagatgtgtcataccgtctgtaatgaagcaggcatgccctctttaggctaacatattttagtggctttgctttttgctttttaaaaagtttttctctttaagagatgtggtctcgccgtgtcatccaggctggagtgcagtggtggaatcatagctcactatagcctcaaacttctgggcttaagcaatcctcctgcctctgccccctgagcagctgggactacaggcacacaccatcaccctcagctactagtggctttgctttaaagaaacagtggaatcctaaatttatgactaaaaattcccccaaaagatgaaagatctacaatgtttttgtcagtattatatttgactcaggaactaattattaagggagctttgacacctgcagatggagggctgatcttgtgtcaagttaacaggaagactgcccacagatgacactgcatttgtatccctgtggatgtagagtattgggaaggcatttgtttagtttcatgcctccaaaccatgcattgtctgtgatgtatctgcccagccttctcagaactcaatgttgtacatttttccctctaggacctgaattggtcttggaggcagcttttagaaatcctctgtgtagttcctgtccacatgcactatatatttgtttcttttttctcctctcatgaatctgctcgtttctctacttctgtctacgtagaagcactcagcaactagtttctgctcattaaatgtgttctatatactaggctcagtgctttacatgtgttgtctcacaatgactctctgaggtaaatacactatccccattttacctgtgagaaaattgaggcttagagagcttagtgtcttacctgagtttcacttttccaaagtagtcatccacaaagtatgaggcagacagatctaagagaagaaagacagctgaggtagattcaaatcttttctgacatggatggtggctttttactcagaaatatatacctatttccatgggtatttgtgggcctgaggcatgcttggcaagaagagtctggtttctcgtctgctatgcaagccaaagggactttaatgttctttgaattgaaccctccttagctctgtggaaagagacagtcaggaatatttgggaattagacggcaatactttgtggggtttattagagcccatgcttgcctccagagatacagttcttttagtgaccagatactgccaaattgatgtgttcttgctttccaggtgagctttttgttcttaagattaagaaacctatgaaggatctgcagccaggcatggtggctcaggcctataatctcagcactttgggaaatcgaggtgggtggatcgcttgagcccaggagtttgagaccagcctgggcaacataatgaaaccctatctttacaaaaaaatacaaaaattagctgggcgtggtggtgcacacctgtagtcccagctactcgggaggctgaaatgggaggattgcttgagcctggcaggtcaaggctgcgatgggacatggtcatgccactggacgccagcctgggccacagagggagaccctgtctcaaaaaaagaaaagaaaaaagaaaaaggtctgcccacaaaatcactagcttattatttgcttcctgtgtgcctgcttgtctacctagcatagtaggccaaaggtccaaaggcatttagcattcctaggggaaattgtggctgtttttctgagccagatctcttgatttgggtttacacggagtcctttcatggactatcctgagtattgtcagtaaaacgtcttggggcataagaacttgtctgaatctgtcatacataccactgctgtcttttccgagtggtattacaagaaagatttttgtggtgtgtttgttctaagagaaatgccaaggctttcagataaagataagatgataatgattgacattgttctgctcttttatttgggtaaaaaaggaaagttgaggggtcagaacacagtagcctgattagtaccattctgttttgtcacactgttccccattagcttgtaccagttctcctcttctcggggatgtagagccaaaatgtcactgtgaccaaacaatctgttcaattttttctcctcaatggagaggtgatggtgtggcctgggtgtttctccaggagtgtgagtgggcagctctgtgggataagtcctaggtacctactgcccatctctagaggcgggcccccaactcccttcccctgttgctctgttctgccgacctgcattgccagcagccttggagttacttatgctcttcttgctcgttcctctccacctagatggtagaatctcttatttttagatcaatgaagtttttttttttttttttttttccactggggcattcctgagtttatttggggcacacccgggtgagggccctgcccctagaagaaggtgttgggcctcttggtgaagtgtggcttgtgcggatagtgcagtacctagtggggcagcaggaagttgatcttggagtcatggaactgcttgacggctggccggcggcacttgctggctgtggtctcctccaccttcatgatctggacggagtgggcccgggcgtggtgccaggcgcccatgtcttggtagcactgggtgacagcacccgcggtggtcaggtccccatattcccggcacatgttgtgggtgctgctctgggcgtcacagtgcagccagatgccgaagttcttcacccgcagggggcacttctcaaacacctgcccacagtagcaatctctcctgaagacttcttcatcttctttaactgagataccaagtaccaaaagcaggacttggcgacgacatgattaggtgcaaagattcgcatgtggtagaggggtagtgtatggcatttgggggtgggcaggcagcgacccaccaccttgtactctcatagtgtgcctgaggccttcatggcgtcctgtctgccctcaccgccacctgcaaaaggacagatcaatgaagtttcttaggtttttatttcttttgaaagatgctgcctggtcattgtggaaaatggagataagagcttgtaatacaaagttgcagtctgccagtcctcatttttatttatatttatttatttatttatatgatttgcacatcagacaacctttgaaaaagtttgttagtgtgtaacagtggtgtttgaaatgtatcaacactttcttcaagagttcccccaaacaaacttgaaatgtaaataattggttagaggttagaattttcctcctgtcataccgcttcagccctcaatgtggctgttgatcatcctggactcagatgcagcataggctgagcgtgagattctgcccttctgttctctttaccctcagacagtccctggtctgagggaaaggcagccgtggaggaagtgccagtctggacaggctcttctgctggaaacccacatcccaagtttctctctaccttcagtgatatctttattgtgaaattccaaactgtggtccctgaattgaggctgttgcaccaatattgttgtgtgttgccatacaacaaattgcaaaggttaggagactggatgtcagcccttaattaaagacctgcaaatatttctgccccttgcaccttgaccttcaagcaatggaaaacttgtctttccttcagacctttgattagaactctaggctgagttctatacttggaatgactctgaatgttaccatgtcacctacctgtgtcccctggcctcatccttgtgagtacataagtgtcattgatatcacctctgtgaatcgcaaacttcccattagcagcccatccctgaacctaaccctgcacccagggtgctgtttgttccctgcccaccccttcataccttcactctgtgtgtccttccccgtcctggcacacttccaagtgccttctgtatcctcactatagttcattctgatggatttggtcagggctgggctcacatcaggtgtgaaactcctgctcctgcctgtctccatgcctagcctccatctgggatgctttcctggatgtcatccttcttggagattgtctatcggggatccagtgttcctttttccagtctagccccaccttcagggagcaaacctcaggtcattagggccaagcaagatggactgcattgacacaggccccatgcaattcaggacagtgggggtgccgatgggctttcctactcctgaacatgccaactgtggtcaaggggtggactgcccctgagtgtgccaagtacctctaggggtcactgtggcctagtgtcactgcaagacttagtttcagctgtggcaccaccccagtatggaacttgcagctctgtaagccacaaagaactcagtcagcctcagacatcaggcaccaggcactcaggctggatggaatagcagaggttatcttgtccagtgggtctcatgtttggctcacatcagaatagcctaacagcttaataatgttcccctaaactttgttttgagaaatttcaagcctacagaaaagttgaaagaagagtgcaatgattgcccctccccccaaattttgtctcgtttgctttctcttttttccaaattattaaaagcaatttgctgttttttttaaaaaaagtaaattataggcatgacacttcacctttctaatacttcagcttatattacctaagaataagaacattcttattttttaatataattttaaattttattataattttaaaatatcacatctaagaaaattaccagaatttgatatcatctaataaacaattcctattaaaattggcccaggtgttccaaaatgttgtttatgcaattttttccctaaatataggtttcactcaaagttcatgttgttataactagtctcaatctagaataatctgcctcaaaaaatagattctctaactcttcttgaggttttgattctgtagatttggtgtgacgttggaatcagtattctctttttttgagagagagtcttgctctgtcacccaggctggagtgcagtggcgcgatctcagcatactgccacctgtgccacccgggctcaagcgattctcctgtctcagcctcctgagtagctgggactacaggtgtgtgccaccacacctggctaatttatatatatttttagtagagatggagtttcaccatgttggctaggctggtcttgaactggcctcaagtgatccgcccaccttggcctcccaaagtgctgggattacaggcgtgagccaccacgccagcctggaatttatattttctaaacaagtaacactgatgattctgctgataaaccagggtttcaagccagactggccctctactatacctccaccctctcccaatacatatagccactagacaggagtcctttgtcagataagtggtctttgagcttccgaatatctctaagggagtatgttctcctatccctttgggcccccagctatgcaattttctttatagtagatcttcataagatgaagttgaaaccttcccttgtaattcctacccatcaatgacaggcccaaactgccattccaggccacacagaactggctggcacctcctttcacctgatagtccttttgagatatgcagcttataaagacatgtggcatctcatgtcacgctcaggtgctcatgaatttcaggcccttcaccatcatgattttttatgccttcatgatgtggcagccacatctgagcaaagcattcaggacgcagtgatagcagtgctgaactgagtccaggggattgaccgctcttctcagggacgctccacttttcacactatataccattgcttcctgtggaactcggtccaactaactgcctcaggtctttttcacatgatcgatctgctgtcaaatcactttcccgttatgcacttacagagccaatttttggagcacaaatgtgagattttatgtgtgcccaactgttaggatttcatcgtgttacagtttctacccatcttcaagtgagttcacattcttgatgatcccgatttggccatctgacatggttagctatgcatccgagctttgagatagcagattgaataaacaagccttcaatgcgtttgttaaaagcattgaacaagacagagccatggaagatccctctggtagaaaactcactttacatggcaacccacttcacatacccagcaagtttcgtgtgataatgtgctctgatgttttctattaagttcattcctgtttgtttgtttgtttgtttacttatagagacagggtctcactttctcacccaggctggagtgcagtggtgcaattgcagttcactctaaccttgtactcctgggctcaagcaatcctcctgcctcagccttctgagtagctaggactacaggcatgtaccagcatgcctggctaattaaaaactttttttttctggagatgagttctcgccgtgttgcccaggctggtcttgaactcctggcctcaagcaatactctcactttggcctccctaagtgctgggattatgggcttgagccaagtcactgagcccatttctgtttctttagaaggaaaaacactgaattgattgcattatggagaaataagtctccatcacaatttgcctgtgagtcactctgggatagggagagtgcctgccgcatctctgggtctacatggcatgactgggccaatgtttggatgccagcagtgggcagggaggctgctggggaaacttggggtcccacataatcatctttccacttgtcagtgcgggacagttgaggacaactgacttcatccttctgaatcaggttcctcacctgcaagcaggttgagaaggacctgcaggattggttgaggattgaataagataacatgtgcagtttggtaagctcttaataaatggtagccagttactgtgaattcttgagaatgattattggtgtctgatgaaagtcatcctgatctgagagagtgaaggacagagccgggcctcagtatggtgttaacctgaggtggtggaagtggttcaatctcttctcaaatcctaagactgtgatgtgttgcaaccagccctttgagcatatccgtgctttacagtttgcagagcgctttccagttagagcttatgcagtccaccatttgaatcggcgcgattcatcccatttcacaaacgaagcaacaaactctaggaacttaccaagattttccagtttccaatctaatgtttaccctcaactcccccctcaaggttgttgcagttattttcatttgctttcttttttttaatatatatatatattttttattatactttaagttctagggtacatgtgcacaacgtgcaggtttgttacatatgtatacatgtgccatgttggtgtgctgcacccattaacttgtcatttacattaggtgtatctcctaatgctatccctcccccctccccccaccccacaacaggccctggggtgtgatgttccccttcctgtgtccaagtgttctcattgttcgattcccacctatgagtgagaacatgcggtgtttggtttttttgtccttgcgatagtttgctgagaatgatggtttccagcttcatccatgttgctttctaattcggtcattcatgcatttacccatttcagccctacagtgccctgctaactctttagaggcaggaggataatggagttgattcttttctgaggcccctgcagggttttgcaaatagtgagtgacactcaagagatgttttggagttatgcagcaagtcagaaacgtggagcttatcctgcttgagtcctaatgtgctcatttcacttgggcagggggcgcagggacacagaagggtggagacctgggtcctgctatgtggctgtgatcaagcctgggtcttgaataacacccgggtactgagcattgctgaactcatgcctgaactcccagggcactttccccgggcaccctatgttaggctctgcagtctcgtctgtggtctgaggcagtcaccctggtgggaagatggaagcgtggaggtggcagtcagagtgcgctgagcaagggcttttgtgtgtttgaccctcggagaagcagagctaaaattaggtcttccagctgtgtgcaggtgtgaagccccacccccttacctacccccaaccaggatctcagaattattcccatcctctccctcctccagccccagttactccacaggcacaggatgaaatgtcctacctctggtgatgcccggatagaaagatctacccaaatgtccttcaaggctgcaggggtgggggcagtgacaggcagtgaccttaagtttgctgagcctccctagcacctttgaggtcttggtgcaaccggggcccaactggctccttcttagaccaccagacaggatgatgttttggttccctccctgcacacatgaagggaccctggcttctcccactagcctcttgattgatgtgctctgtgcccctactctgcccaccacttcagagagagcctttgacccctcgccacccatcaccattcagacacagatggaagagagctagtctgggggcagagatggaagagccctgccctggggggtcttatccaaggcaggtggagcccaggatgatatgatttgattgtgctctctctccctgcatgaggctagaataggaacagactggccctcctcagggataaatgtgcccctcactcctccttcactatggcccttggaaccctgctctcaggggttccccagctgaggctcatactctttcatgttctggtctggggtgagaacctgccttctacttctggctcctcggtgtacctgcgataggatcttagttaagtagccgctcctcactcttcagttcctttatctgtaaagtgaggggttggggctagacagtgtccagcatccctcctctttggtgtctcttaattgtccagggcagagcaatccttggagcaaggcagcctgctgcggtggtttgcagaagaggcacagtggggcgggctggaggccgcaggggcagagtgggccgagggcctctgatgaggtgtgaatgagggaggcagagcagggctggtgtggacagccctgtcccagccctatctcccgtctgcgacaccctctccacaccccagtgctgataagcgggtgtgagccacggccgccttgtgacaggcccttcggcagggagggtgatggtgggggtccactccacttctgaattcagacgtcagcatctttttcccccaacccccattgccctgtcagactagacaggccctagcaaccaggcaccctccctgacagtccctggcttggagatttgtttctgctccatgtggcctcagccttctcagagatggtaggagacagacctccctcagtcctttctggcaaagtgccaaggaggatgaccacctcccacccccatcaggcccgttcctgcagtgactgctgatgctggggcctggcacacacagtgcttcttatcactgggcaaacttcaatggctgatccttttgtctcctctcctcaccccatctcctctatcgctgtgaccatcagcttccagtcttccccctccagctccctagcttttgggccatttctgtgtctgggcccacctctttcctctaaggccactgttcaccagaaggctgtgccagaaacctcttatttctggattcactgggatggggtggagggaacggaaaagtcttggagaaagagagacagaaacttggagctctagggaaggggaaggagaagacaaataggaccaagccagaggctataggaaacccttcagggtggagggtcttggcccaggtgtctagcccctaggctctatggcactgaactctgaacttccttccatgctctaaaaggctctcttctgtgttcagatctgaagactattttgattagcaggctgcatccatactgctccgggcagtcccactgtatgtgtctgtggggaagggtgtgcctgtcctcctgtgtgcattcctgtctatgggttccattctcagcctctgcatagcttaggaggcatcagagcatcctgagagcacagacttgagccaggcttattagcctggggtcatatctttgccatcttaaccaggtgggggagctacagcaagtagcgtaactgccctgtgccttggtttccccatctgtaaaatgaagatgacaacatggatgatagataataccatataccttgtagaactgttataagtaccaaatgagctaaaataagtaacgtgttttaaaccgtatcgggtacaatgtaattattggccattagtaatatttttgtaaattttattttaatataatttcaaacttagatacggaaaagttgcaagaaattcccatatgccctttatgcagattcagcaattgtttatattttgcacatttattttatcattctctctttcctcatatatatgtgtgtgcttatgatgtactctgtattcgtatctaccatatatagtatatatacacatacgcacatgcacacacatatttttttcagagtcacgtgagaataagttgaatacatcatgccttttttgccctaaatacttgtgtgttttggtaaggacaaggatattctcttacaaaaccatagtatagttattaaaatcagaaaatctaacattggtctaatactgttattgaatccacagtccacgtgtatatttcatcagttgtctcatcatatcttctttctttctatttctttctttctttctttcttttttgagatggagtcttactctgctgcccaggctggagtgcagtggtgtgatcctggctcattgcaacctctgccttctgggttcaagcgattctcctgcctcagcctcccaagtagctgggattacaggcatgcaccaccacaaccagctaatttttatatttttagtagagatggggtttcaccatgttggccaggctggtctcgaacccctggcctcagatgattcacccacctctgcctcccaaagtacaggcgtgaactaccaagcctggcctatttctatttctttttcctgttccagggccactcattgtattcagtttccatgtctctttcacctcctttaatctgggagagttcctcagcctttctttgtgtttcttgaatttgacaattttgaagcgtgcaggccagttatttgaagaatgatgttgctcaaatcctgttggatgcgtcctcattatgactttcaggtgatgtgttttggggatgattgctgaaggtgatgtgtctttctcagagtcttacatcaggaggcacattatgtcaacttttccacttgttagtgatattatctttgatcacttagtttaagtggtgtctgttccccctcctgtagaattactattttctctttctaagtaataagtaattgtggggagatagtttgagactatattcctcatcaaacttatacccactagtttttgcccactaataattttttacaccatcattacttctaaacttactagttggcccattcatactggctcctgtgtcttttgacatttatcttcatccgtctttaagcacttttttgctttctggcacaataagatgttccaggttttctggtgttttcctggctctagccctgaatcagccatttcatcaaggagccctggttccttttaatggagaatgatatttagaaaccaagatttgggtgctgtaggtgctcattcatatggtgtgttattgcttccagttggtcctttttattatccattcatttggatacaatggtgagggcgccactgaagaaagtgtggcttagggatggaaagggggaaaggagccagatgacctaggtagagactcccctctccccctctagctctccaggtcttccccactttctctttcctccctttccctcttcatcatgacctcatttcccttttcttgatcaaaattcctctggagattccagctgtgggaacctctgaaaccacttctgcagctacacgtgtgataccagaggcagacaactatgtgacctttgtgtgtgaaaagccaaaggcaaagacaatttatgagaaagtttttgctgagaacaatctggtgacagggtgattggggaagacacatttggaagatttccacctggacgtgttccttttccctgcctgaaaagcactcagagcagagcctgtgtggaggctgggatagggtgctgtgggaggtctgttctccagataagcctcttcaaggctctggggaccaacgaggaggatttaagtgcctggtgaagtccactctctgtgtccacaagtcacagagacagtttaaaatgaaataactggagttcaatgaaagccacttaaatagctttcttagttatgtaaatgtagggtgaagaatgagtggccttggtcccccacctggagttagtttattgttttgagactagatccaaagcctcctctccctgagatctctggtatgcaaagctggtccctggaggaagcgcatcagttgacagagggagcccagaatctctgtgagggaagaaaacactatccaactgctgctcctgggatttgaagtgaagagaatttgttgggatgaagtgaggtggccacaataaaggcgctgggccatggggcttctgaaatgagattaatatgaggaacacctgagtctagggtggtgcccggggcttacaacaagaacccacctgtgtttcctggggtaaggctgtccttagcatagtgtgaggctaactgctgggagctctggagactctgccatgctgacattgtgcctgtgctcctggccagggactgccacctagatatgagtcacagtggggggcccctgggctccagttgactttgaggagtgatactgtccctgtgaggacgctatgagtgtcctcaatagtgatgtggtagtgctggtcagacccacaatccctattttccttgtttttttgtgtgtttttttttgttttttttttttaaacacgaaaaaacaaacaaacaaaaacctcagaaagtgaaaatccctaaagggagggactggacgtgtcatgtaaattcttgattggttaacagaagaaattaaaagtggattgagggcacctttgtgctctgtgcccaagggaaagttcaaacagctgcattcacagataccagagacgccagtgtcttcaccatcaccagcgacgtgtgggtgctgcctcaacaggtattgggaacttgctcttgtttacagcttggctcctcatggtagctgtaggaggcaggatctgggtggatgggacctgggattcattcttagaataggtccccaaatggtcatccattttgcttgccgagggctctgtggggcagacgtaggaggcctgaggggctgcctgggaggtgatctgaggaagcctcttatggcactttcatggctctcctagccagagaccagagacacctcctctcccacttctgagcgctccatctaccaattttgcatccgaaatagctcccaagcttctcattctctactatccccatcctggtccaagccaccctcatctctccctatagagatcacctgactggttattctccctcattgcactttgtactcccctaccccgccatatagttttgtaactataaacagccttgtttgtggatttggaggtgaatacctgttttcctaacttgattgtgagctacatgaggacagggaccttgtctggttttatctataagatgctcaatgtgtggttgctaaacaaagagtggacagacgcctcggtttccccagctggtccctatgtaggctgatctcacttgatgggagtgagtgagtgaggaaggggaccctctggttctggagcctctcatctggccctgctgctcagtattcattgatccttcaaatgtcagtgtgtccacaggagagaaagggtggcaggtagggctggcagaaggcagatgtgtggctttatagtgatcctatgcttggggctgggtgggtttcagctggggtgtgggagcagagaaattggctttgggaggctctgtgatgggggccttgcagcaggtgggtggtgagggcagcatggaggtggtggctggcctggaagggaggaggacactgggtggctggggtgccaagagagtcctggtgggggctggtagctgggaaggctgggcagggctgcccgcaatcaagagggtgacaatgagtatgaagagtatgcttagtggaagtgaaggcctgggaggctgggaggaccagaggttcgtctcccccagccgcgcccttgctccttgctctcatcttcctcacccttcctgcaccctggccgcttgggacctcctcttctccctgatctggtctttcagaaatctctggcctctaacctctataaccccttcctctcccagcctcccagccctgtccactccccgagtcacatccccaccagccctcctgccctgcctgcagcctgggccctgctgagctgccgtgcccttctctcatcacctcctcctcgctccctgtggcaccttggcaccagccccagatctgtgtgcactgatttcccaacattcctgtcctccttcccaccccactgccccaaagggaggggctcaaggacttgagacgcttcccttggggggcccagctttcccccagagtcagggagggatgaaggcagggctgctggagggctgggcccgcagacctgtggagctgcctagtgggaggtagagggctggagtgggagagcatgcggagccaccgtgggggcaggagatgcagccctgcaaggccacactgctctccccagcttcccactgtctattggtcttgcctggtgtcacctgcccttcccagctctgcctctgacttctgcatctcccctgatcctttcagtttctcatggtccttcttatgggtgattaaggagttgggccctaggccatttctggaaggcaggagttggaggtgagcttcctgttgccttgtgtgtgtaactctagagtcccgtaggtgggtggctgctggacgtgccctgggaggggaaagggacctgtaagggtgtgtccataaacagagcgattctagaactcagggatgctactgtggacaggacttagagattgttcagcccccaccctcttccacaaccatttatagatgaaaacattgggctttaagagggaaataggattgacatgaacgagtcacgtaggggttagtaatcatcatcactgtcatcatactagacatttattaagtgcttactatatttgagggatcattgtaaattctttacaaatcttaattttcatagtcctcacactaccctgggaagcagctgttgttattttccccattttacagacaagggaacagagactggaacagtgaggtcagtttccccagatcacacagaaagcctgtgtcagagcagtggaagtttatcacacacagggaggcttgctccttccaatgatgatgtaagcgtataagcattgttgagagctctttaaaacagtggcagacatttcaccaaagaagatagaggaatagccaataagcacatggaaagatgctcacattatgggcacggtggtgcatgcctataatcctagcactttgggaggccgaggcaggaggactgcttgagcccaggagtttgagacgagcttgggcaacatagcaacacccccatctctacaacattttttttttaaatagctcatgcctgtagtcccagctactcaggagcctcaggtgggaggatcgcttgagtctgggagttcaaggttacagtgagctatgattgtgccactgcactccagcctgggtgacagagtgaaaccccatctcttaaagaagaaaaagacatgctcaacatcattagtcatcagggaaacccaaattaaaattacaagatacacctactcaaatggctaaagttaaaggaaaaataaggctggaaataataaatgctggcatggatatacagcaactggaactctcattgctgattgaaaagcaaacaaatgctttggaaaacattttgacaatttcatataaagttaaacatacactattaatataactctgaaattcaattcctaggtctttacccaagagataaaaacatagccaggtgtggtggcttacgcctataatcccagcatgcctgggaggctgaggcaggcagatcacttgagctcaggatttcgagaccagcctgcgcaacatggtaaaaccctgtctctaccagaaatacaaaaaaattatttggtatgttggtacatgtctgtagtcccagctacttgggagactgaggtgggaggattgcttgagactgggaagatgaggttgcagtgagtagaggtcatgccaatgcactctagtctgagtgacagagtgagactctgtctcaaacaaacaaacaaacaaaatccaaaacacataagcccacacaaacatctatatacaaatgttcatggcagctttattcacaatagcaaaaaatggtaaacaactcaaatgtccatcaactattgaatggaaaactaactgtggtatgctcatataatgggatactgttcaacaataaaaaggaacaactgatacagacaatgacatggatggatttctaatgcattatgctaagtgaaagcagccaggcacccaaggctacaaacgaaaattcctgcacttatatggactctccagaaaaggcaaatctataggaacagaaaatcgatcagtgattgccaggaacagcagactgaccatgaaggagatgagacaacttcttgatgtgatggaaatattgtatatcttaattatggtgatggctgtactgcttaaacatttgtcaaaactcatcaaactgtgcatttaagaagggtgccttttattgtatataagttatactttcctaaaactgattaaaaaataaaaacaatgggctgggaaagggaagaaaataggatggtcatggtcatccttattgcaaaagtgacctctaagacttggaagaggaagcaggggagctagggctgatccctgggggaagagcattccaggtgggagggaacagccagtgcttcagtgccaggccaggacatgcttggcctgctcaggaacctgtaaggagtcggtgttgctgaagtggagcaagaggccggccgtagcggggctcagacaggcaaatgggcaagggatggatcagggctgggtaagggctgggtaaaggcttttcctctgggtgagatgaggctgctagagggctttcagtgagcgtgatccgacttgattttaataggaccacgctggctgctgtgttgagagcccgctggggacaaggaccagtgaggaggccactgcaagaatccaggagagagatgatggcggctcagaccagcgcagtggcctggttgaacttgggatatatttcgaaggtagagccaacaggatttccggccggattggatgtagggtgtgagaaacagagaggaggcaaggatgacgtcaagggttttggcctgagcagctggaaatccagccgggcacccccgtgggggctgttgagtggttttaactgtctcctggggcctgtgggtgaagctgagacagagaccgaagggaggggctgagccctacccctggctctgtggctcagggaataggctgcacatactgattattccattaccctttatttattggccttattggcttttgtcatttccttgtctcctgtctggagtgacagctataaatgtgatagattgatacaggatacaggagccccaattatctctcttaaaccggcttctcttaaacagggagggctctcgggcaagctgtccctgccctctgccttctttgccacaagtcctacagtcttccttacagaagtggcctggttctgccagggggggagcgatgcctgggaggatgagtggcagacatgggccccaaggggagatggctcccaggacaaatactggaggcaagttcggccccctggccagtcgcaccaaggatcccagtgcacactccctgatgctctgcctcacacagaggccagcacagagtggggcaggcgggaagacaggacatactgctggctgctcagcccacatccggggaagggggctccactctgaccttgcatgcctttctggaatccgagccggcctgtctgtccacagaggctgggatgatggggcttttctctccggcagcaggtgcctggcagctgcccggggatgccagctccgtgagctggcatgggaggaagtgcttgtcaggatggtcattacacgtgctgggctcaggctggcctggccccgacccctgccactcaggctggcttgggatacccacatgaggatggcgcttcctgaagggaccctggggtccctctgggatgccctcggatggagcttggcaactgccagcctttaagtatcatttctgaactaagttcctcacccatcctctctgcttgactcttctctggcctgtctgcctacctctgtccctgggaaagtcctgagggccctggcccaaggaggtttgggacaggaagcctgacattcattctcgggatttgaggcatctccctgtgcccctcctcatccttgacagactgactacagcctctgtgccttgcatgtgcacaagtgcatggtgaatccacacgtgtttatctggcaagaatttcaaatggtcctgtgtctgacctccttccagaaaaacagagtggaaggtgggactgctggtgagaaaaggggcaggaaacttgaggggacaagaagggttcaaacggaggagcaggtccaggggaactcagcagagagtgaattggctgatcaatcagtttgtttcttctgcaaacattcccagctccttatctgtgccaggtgctggggcaggggctgaagactgtgttatgaacaaacaggtctggcctggccttgcacagcccttagactcacaggtgggctgcacagtaagtgtgcttagagcaatggtggggtgcaaaggtaccgtgccagcacacacagactctcagaagcagccaggggcaggagacgctagttcctgctgttcctctgagcccatcagtggctgccctttggcatctttgccaccacacccttgcctcactctcagttgctgtccccagttgctgtctctgcctgtaggagtgcctgggcttctgtctccctggcccctcccaacctcctgggctttgagtctcgtggccatcagggctgatatcggaggagctcctggcacgggggtagggaagctgccaacactgctgtggcccccagggtgagagctgacgtctgtccaggagcatctctctccctgccaagggctgagatctctgggctgcatgctttcccgctgacacaggagccagcatccgtcactcacagggccacccgctgcctggaccccagcctcaccccagagtgacccagtgacagctgcagccttgctgcaagcacaggcctcctctccctgcctcagccacttcccaggctcactcactccttccaggtgaacccacccacatcccaggccaggtgagggcccacctcaggcagccagggaagaccccacccaaggggccgagaagcgtgggctccaagccttggtttcaagaacaatgcgggaagctgcccgctggcccagaccaaggtggtagttaggatccctggagcttgtgagaaagacctgactcccctcacagcctcacagtggggtcccagcctccagcttccctcctttcctcacacataatagtcattgagttaccaccatgtgccagccactgagctagtcccgggatgcagtactgagtaaagcagacatagactctgttcttgtgctgcttttaagtttttttcactgaggttcctagtaagaagtttattttctatcactcaccaggatacacacatgggcactcacccacattttatatagagctgaatcaacagtttctccaaacaacactcactcttaccacatgggatatactgctattttaaattctgatattctttttaaaaaaaaaaaaacaaaaaaaaactggacatagtctgccatttgaaaagctctcgtgtggctggggaaagatgattagcccagtggtgaatggactatccctgccccggtgtggaccaaggaaccaatatcagaggtttcagggcaccgaaccacatgcctctcctatgaagttggtttacaagggaaataaatggcgccacccacttgggcccctagtcacatcaaggatataaaaaggggtctgagagagtggagggctgcgggaccctgggagtcagtttcttcggagagagctgctgctgtgctgtttccaggaccccagccttcccttgcaggaggttctggcaaggcttgtggcaggcacataccaccttctaactctgggcaggccaagggggcttccagaacttctcagagagctttaagatgttggagacacagagaactgggcctccaggatccaagaaagctcaagtggatgagcgagtgtgatctgactcccgccctgggaacccagaggaagggttgcaggccagctgcactgggggtggctgcagagggcactgctgtcagggcatgaccccacccagagtaggtggggcaagtgctccaactgtttcttatgggccagaggtgggcaggcgaagagagagccagtgtgcaccactgtgacagggccacctggagggacaaggggtcttgccaggaagggctaggctcatggttcccatgggcaaaggaagacatcataagggggtacccagaagagagagcccacaaaaatgccttgtgtgagagcatccctaaccatctgcctggcctggggaggagaagccaccagccaccctgtctctgacaagtcatgggatcgaatgctctcctggcctggctgagtctgtgtttataacacaaactgactgattaggtaaaataacctaagactgagctgcaaagctacaggatctgcccgggttttctccagggccagggaagatgatcgccactgaataaagctaaagagacaggaagggacagagacaaaggctgggttatattacatcagggattgtgtttgttcacataatgactttgcaggtatttgcaaggagtgtggagggctgtggcagggaagcatcaagagtggggcacatggtggggaggggaccgggctgtgtcaggggaggttcccagaggaaggggcattcagggaggtctgaaggctgagtggaaaggagaagagtgttctggcaaggctgggaggaggaggagcctggagcctttgaggggttggaagagatgctgttacagaggttggcaggactggggagacctctgaggggtttgccttgatcctgaggcaatagaaagccactgtgcagtcttatccagagggtaattatcttggatgaaaatatcactctggtagctgagtggagaagagtttggaatggatgaggttagaggaaggagcttccctggtggcctccatgaggcgatatgctggcctcacccaaggaagggacaataagatggagccaaaaggtgggatttgaaagacacgaaggaggtggagccaatggggcttggaccaggtgaggggtgagaggtgagggctgcatgcggctgaggatggatttgtgggaccaccttcacagataggctcagggtgaggcagaggagctcagagttggctgggctgggcctgaaagctctggagatgtccaaagtaagcagctgaatctgctggcctggggatccaaggagagacctggcctcaggaaaagatcaagactcttcaaagccataggaggggaaaagaacgtgttttccactctttctgggagagagcacagggcctaaagaacttgaacattagtcagacaccagaggatgttctgccaggggaggctgaaaaggcacagtcaataagatgggaggagacacaggcaacaaaataaaaaatagacaatggagttcatgaaaattaaagttttgtgcatcccaagacattatcaacagagtaaaaaggcaacccacagaatggggaaaaatatgtgcaaatcatatatgtgataaagaattaatatccagaatatatagagaacttctaaaagtcaacgacaaagaaaacaaccaaattcaaaggacctgaatagacgtttctccaaagaagaaatacaaatgacgaataagcacatgaaaagatattcagcataactgatcattagggaaatgcagatcaaaactacaatgaggccgggcacagtggctcacacctgtaatcccagcactttgggaggccaaagtgggcagatcacctgaggtcaggagttcgagaccagcctggccaagatggtgaaaccccatctctactaaaaacacaaaaattagctggtggtggctggtgcctgtagttccagctactcgggaagctgaggcaggagaatcacttgaaccggggaggtggaggttgcagtgagctgagatcgtgccattgcactctagcctgggcgacagagtgggactccatctcaaaaaacaaaaagcaaacaaacaaacaaaaaaactacaatgagataccatctcagacagattaggatgactgctatttgaaaaaaacagaaaataacaagagttgatgaggatgtagacaaactggaacccttgtgctgtgggagacagtatggcagttcctaaaaaaattaaaaataaaattgccatatgaaacagcaattccacttctgggtacctacccaaaagaattcaaggcaaggtctcagatatttgtgcactcatgttcacagtagcattatttacaatagctaaaatgtggaagcaacggaagtgtccctcagtgggtgagaggacaagcaaaatacatacaatggaatattattcagccttaaaaaggatgtaaattctgaaaatttatgaaaaaaattaagaaaaaattctgaaaatcctgaaaaaaattcctaaaaaggaaggaaatatgttgtgacctggatgaactttgaggacattatggtaagtgaaataagccagtcacaagaggacaaatattgtatgattccacttatataaggcacttagggtagtcaaatttgtcaaatattatatgattccacttatataaggcatttagggtagttgaatttgtcaaatattgtatgattccacttatataaggcacttagagtagtcaaatttgtagggatgaaaaagcagaatggcagctccctggggctgggggaaggcaggagtggggagttagtgtttaatgggtgcagggtggtaatttgggctgacagaaaagttcttgacatggacggtggtgatggtggtaccacagtgtgcatgtgcttactgctacagaattgtacgcttaaaccatggttatgatggtcagtgttatgctctctcagcaagttccccagacttgctcaggagaaggccatctcccaggccctcggtcctctgctaccactcttgtcaaatctcagcacaaggacagagcctagaccaggtcatgtaagccatttattggtttgttttaaaaatatgtattttatttatacatgaagtttggtgagaagtgctcgattagttcagacaacatctggcacttgatgtctgtccttccctcctgctggtcattgtgcagttctggaaattaaaaaggtgacagccaggctaaaagctaagggttgggtctagctcacctcccacccccaaccacaccgtctgcagccagccccaggcacctgtctcaaagctcccgggctgtccacacacacaaaaaccacagtctccttccggccagctgggctggcagcccgacctgcctcccaaccgcattcctgcctgtgtagcaggcggtgagcacccaggaggggcacatacctctccaagccttgagagcaaagcatggagatctacaaaaataggatttccacttggagaaatgtcgctgggacagttaaaccgtgtcccacactggactcaaagggaacacaggagaagagaactagatctgtcaggggcatgggttgggtctggggttgccaccaagggaactggggtgacaagaagaaacataatactttactcgccggcaatgcccccttcagcactgccacaaatgtccagccctccgacagctcggcgaggtaggttaggagcagccagcccagagccggcaggtgagactgaggtggcctgggaggcatgcgcccggtggaggggctccatgggagagctggaatggggcagccaagcccctgcctgctcaggcttcgccagttgaccctgttacctcagggtgacagttctctatgttaaaagatttgcatatgctaaataggattgtcagcagctgaagaggtcctgggggtgattggactagtaaaatatttttccctgaaaaagccttttcacaagacctatgggaccacctggatcttgccccaaagaggtcctctgtgtgggtgccatcaggatcccgggctgagccagagaggctgggcctgaccacagtgccccctctctcaaaggtgccatggttcattcccctctaagggcacgagaactgggcctgaccatccctttccctgcacagggcgcagggccaagctccgctccccactcccatgtctctgtgtctggagaggagctggagaccacacagaaaactcctccgcgtatggtccagagagccctgggagatcgccagtttcctctcttcaggcaggctgaggggccgccatggctcagggctggtgaacttcttagccccaaacccccatggctcagccctctcttccgatggctggctgggcagggcctgccaggttccaggagcaaggacaagctgcatgccaggccgtgaatggggcttgcacccttgtgtcctttggttttgttaatactcttacaggaggggaagaaaaggcaactatcagtgcctagggccagccctgggacccaggccactctcctctggaagccttttatttttgtaggactgacaatatgacctgcgtgaaaacacagggggaaaatgggaccttggagacaatagggggccagagtgagccccgtggacaagaaccccatccttggggggccggcagggaaaggcctgtctcccttaggctgggagcctgggtcccacggcctgtgtctggcctccgtgtgtgaggactgtgtgtgtgtgcttgtgtgagtgggggttcagccctcccagcatctcaggtcaagtgggagggggaccccattcgacccctgggcagtgaagacctgtgggagccacactggattccacttctgctttgagaacagacttccggctgctccatagacactcttgttcagggttaagaagagacagcgtgaattgctgcccatgtccatggaaaaatccttagttctttgctcaagtaaaaaaatatcaaatataataaatttatgaaagcccattcacaacatatacagtctcagttttatatttcgcctcagcagctgggatgaagttgctttccagagccgcagggcattgcctgaccagaccaggtcacaggtctatctgaggcctccaagcacaggccaactgctccggctgtccacgcggcgccacagaactctgcctggttgatccgcggggctgaggcccatttcttactcccaaagccaggaaggccccaggctggtttgtgactgactgcatttaggtttgccatggtgaaaaaggctgcttttcagtgtgtcctggccagccaggccgaggctcacacgatggactcacggtccctgtccggagaaggggggaagtcggcgagatcttcactgtggctgtagtcagacccccgcacctggaggttatcgctggtggctctagtgacactgtcataggagggtgggaaggaagtggaggagatggaggagctggagggtgggccaaggggtcgggagaagttctcactcatcacgtaggcgatgaggccctctcgctcaggggcatcctcttcggagaggccgctgcccgcctgctgacggaagaggaaggaggcatgcttcaaagagcgttgcagcaggtgcctgcggaaggctctctggataaccatggccgacacctcttcgtgcttgcgccggagtgtggtggtgatgggctcgtaggagatcttggatgggttggctgccatgaacttctcctccatctggatcttcagggcgtccatctccccagactcccccaggacccttttggtgaaggcaaagagaatgtccatgcaatggatgcggtccccactcaccatgggcaggtccatgttgatgaggcttatctggttgggcttggcgatacggagtggctcagacagggcatcggcaaagtcagacaggaccgaatactcaataaactgagtggcctctgggtcaaatttctcccagatctcatagaacatatcgaagtcgtcctcactcaggggctcggtgctctcctccgtggccacgctgaagttctccaggatgatggcaatgtacatgttgaccacgatgaggaaggagatgatgatgtaggtggtgaagaagaggatgcccacggctgggctcccgcagtccccccgagagccattgctgttgggcagagtggggtcgcagtagggcggcccagtgttgaggatggggctgaggaggccatcccagccggccgacgtggtgatctggaagaggcacagcatgctgttggcgaaggtctggaagttgaacatgtcgtcgatgccagcctcccacttgacataagcgaagttggccatgccaaagatggagtagatgaacatgacgaggaagagcagcagcccgatgttgaagagggcaggcagggacatcatgagggcaaagagcagcgtgcggatccccttggcccctcggatcagtctgaggatgcggcctattcgggccaggcggatgactcggaagagcgtcggggagaagaagtacttctggatgatgtccgagagcacagtgcctgtgggaaacaacagagactgtggctactggtggcacctctgtcttccagccagcatcactgtgcaggggttggcggtggggggggggtctctatatggcaaggagccaaggagaggcggcccttccaggattgcgtccactgggcatgctaggactctgcctgctcctgtctgtttgagtctccatgtctgcatctgtgacccagaaaaatgggtcctttgcagggttccttctcagccccctcattccttaatcttcagtgtgtacctacacaatagagctgtcctaggcccatcttctacatcttgggttctcaggccagaggggatctgcttagtatcttgcccacccagcttgggccagaactcaggtcttttagctccttgctattcaaagtgtggtttgaggaccagcagccttgggatctcctaggtgcttatcagaaatgcagaatctcagctccaccccagcccattgcatcttaagaagcccagatgatttatgtgcccatcgaagggcatgaaacactggcccagaaatcagtgctccctgatgccacgccatggccagtgtcttctctcagcttctctgtgatggttcttatcgctctcctaactctgcctcctttgagggcgtcactgcccctgggtctcctgtgactacctgggtttggagttttaaggggcatggatataaatcatggaataaagagtgaaataaacttgtcttatatggcccaagtgccctttccagactccttatataataatgtcactgactgacatgggtccagtgtttacgatcactggggcaatgggccgagcactttatagccatcatttcatttagtccttcccattgtcctaggaagtgagcagatgccatcatccttatcttccagaagaggaaacagaggtgaggtaacttacccaagttgccacctagtgagtgagaagctgggatttgactcagacgttcgggctccaagttgatctcttaaccactcctcctctctggtaccgcccaaacagcgggccaggagagatcccaaagtacatgctgaaccttccaaagcctctgagactgtccctcaatggttccattcctgctgctgacatcctgcattctctaaaactcctctccagtcccataaggcacgctctcaccctcatcctgcttgagaccccccagagattcctgaccctactttgtgcttccatcttcccgtcactatagccacagcagtgcctgccttagcccctgcattatcctttacatttaccagaggcagaggttgtatatggcagaaagatgaaagtcacagtcaccgcaaggcagagccccttgggggtagagttaaagagtttgggctccgagcacaagtgacaaaagaaaaaatataagtaaactggacttcattaacatgtaaaacttttgtgctttaatggacaccactaggaaatgaaaaaactcacagactaggagaaaatatttttaaatcatatatctgataagagactatgatccagaatatgtaaagaactcttacaactcaacaagaaaaagagaaataacccaattaaaaatgagctaaggatctgaatagagatttctccaaggaagatatataaatgaccaacatgcacatggaaagatgtcctgcatcgttagtcatcagtcatttgcttttgcaaaccaaaacctcagtgagatatcacttcatactcactaggagggctcctataaaaagaatgcaggcaataacaagtgttggtgagggcaaaataattggaatcctcatacattgacagcgagaatgtaaaaaggtgcagccatattgaaaaacagtttggtggtccctcaaaactttagataagtggttttcaggggtgagggagaggggaaatgaatggggattgactattaaatgggtagagtttcctttggggaaaggaatatattctaaaattagatagtggtgatggttgcaaagctctgtgcatatattaaaaaacactgaattgtatactttaaagtgactttaaagttaaccgtgaattttatggtatgtgaattatgtctcagtaaagctgttatataaaaaaaagatctgggctccgaggtcaaacagacatgggtcaggattgggtctctgcttctccctagctgcacaatctccctcctttggtgctgaattgactgggtgaattgcatgaggcaggtgatgtctgaaggagtctggcatacaccttggcggttagctccagaattttccatcttcagggataatttctactctggagggccacctatcccccatccctggggacccatctcatcctgagcttccttctccttcaacctaagtgcaggcagaattagcctccacagcacccactcccattcccagactcatccttgaagctctctaagcagttagagaactgtgttcccagttcctctggagggtggggccaggagcaagtgctgggtcctctgccagattggtctccttggcccaagtggggccttccagataagttctctctggagaggtgtgtgtgcgtgtatgtgtgaggggagaaggggggtgagaaatgcactgaaaaaaattatgaaagaagctagggttgtacatggcattcagcagagacccaggggctggaggagaggcctggctggggagggcttctccgtccagctgacttgtatacccacccacgatggagaggatgacaaccacgaagtcgaagatattccagctgttggtgaagtagtagtggcgcagggcagccagcttgacaatacactcgcctgtgaagatggccacaaagagcaggttgatcttggccaagatgttgattttctcaggactttggtcatctgtctccaccatcatggtcaccatattcaagcagatcagaaacatgatggtgacgtcaaaggcctgcttggtcacaatgtcgaatatgaagccctggtacttgttctgaaaggagaggcaaatggaaagtgctcagcagggcccttggggaggctggcaaatgcctgttgctgcctctcatcccagaccacccaccctcccactctaccctctagtgagcccaaagcccctgcaacactgccacagagagtgcagaggaaaaagtcctggaggctaaagccactggctgtcctgctgaaatgcttcctgggcttcaaggcccatccccagagctccatcttccatgaggccttccatgatggatcttcagggagagattgttcctgccctgagcatccttagcacactgttcattgtgcttcccttttagttcccacagtctgaaggctcaagggcaaatttaaacttcaaccttagtaattatgtcagtgcttagattaatatattttctccacttttttatggaatttattttatttattctactaaccatatttgtatgtgtctttaattgtaaatcagcccagattatttggggaaagaaataagattttatatatatatatatatatatatatatatatatatatatatatatatattttttttttttttttttttcttctgttctcccacttggaaaagattataaataacacacacacacacacacacacacacacacacacaattttttggataatggcttgattgggccaagggagtcagtcttggagaggaccccgctctccagagctcttggctctccccaccaggtgactcaggaatccggctccctgactgttctggggttccaaggatgaggctgtgagtggggtggggtggggctgtgaaggctgcactgcttttcctggggaaagcctgcatccttgaggggaaggaggagatttgctcaggtacagagggttcctgtgggtggggagtgtcctgggatgctacatccttatcataccttcctccctatctctacgaggctgggacctctcttcatgatcagacatctgatagtgcccctcaggctgggctgaaagactgtgaagcggctctgatggctggccatgtggcacgaaagcttcccagggaccccagaagatcctccccactcccacaaaaccaggagcctggctcaccaggggccgtgggatgggcttctggggcttcttggagcccagcttcttcatggcattgtagtacttcttctgctcctctgtcatgaagatgtcctggccccctaagtgcaaagagaaggcaccaacctcattctggggttctcagaggccccagcatggagggcaccaggatcttgccttcttgatgaggatgccaggattgaccacctcctggctttctctcctggacaaaatatgtccctattctgcaccacagattcttccccaaatctatttatccaggggccctgtcccttttcaccttgagatctctctggctttatgacctgcaaatccagtatccacccccctacccttttctcctcccagctcaaccagccttcaggttctctccgttcacttggtttgcctacaacccagtcatagcctctctgatgaagctctgggagcccaggccctctgcacaggccttacccatgacctctgatcatggaccaggtgaagagttgcagctctcaccccagcttctcccaggagtctcatctcttaggtggattagggcaggcatggggcctcccaccaaagccccttcttacgttcttacaggcctaggcatgttacatccctggacacacccttctccccacctcattccagcaggagcaagaagaggaccatccccaacagggaaggtgagatgggacctggagcctgagtggcccctcaatcccctggcacccggccccaccctacccagcccagtggggagctggtgctctacgtatctttttcttctgttggttgaagttgtcaatgatgacaccaataaagaggttcagggtgaagaaagacccaaagatgatgaaaatgacaaaatagatgtacatgtagaggttgtattcccactgaggctgctcttcatactgcaagggagaaatcacacagggagatcagacaggctggggtctcgggggtcacatggggaggggtggggagcagaggcagagggctgtctaggggtgtccattctgtgggaaagagggtgtatctagaggaaggtcactagcccagttatgtgagtctgtgggccagaggtgggtagggatagaggtgagaggagtggatggtggcaggtgaggacagcagacatgctgagctcagggctggcagagtatcagtgcctggctccggccctgggccaatgggaggctggagtacatggggacctctgtcagtcttcactgggctgtcagtgtgatcgggtggggtgctggacaaagaagaagcttgatttgtgtctctgttgcttccaccccatcctcctggggtaaaagtcagtaaactacagtgagtttaatttgaaagacatttgagaattctgggacttcttaggagaccaagcaaccttgccccagagccaggcttgggcattccagagaggctgaactccagagtgacacgagatcttgcccttgtgggctgggctttcagatgcagacactgattccctggtggccaagcaaccaggagcctcaggtgcctgacttggtggaagaagccactgtggcaacctacccccctggagtccacagctgcatacataatgtccatccagcctttaaatgttgcctgggaggaaaagacaagattaagacaatcatttaattctgtacctcgcttgagcttcttagggctctggtctggacagatgaagccagaagcaagcttcttatgaaaagcaagccaccccacctcaccccttcagcagcatctaaatgcctgggtggtcagagaaagaccttgtttagcactaggggtggggaggggaagcagctgagaagatgccccaagaaggccatgcagcagggaataagcttcttgattgaggccgagagtctgagggggcttgcaggaggtctgcccttcagatccaccctcatttccatttctaaaacatcacagaatcctgacagtgattctgtcagggagacagaggtggaacttagactctgtgttctagactccagggctgacctggtcccctttgtcctacatgtcaga
